(19) United States
(12) Patent Application Publication
(10) Pub. No.: US 2002/0160456 A1
(43) Pub. Date: Oct. 31, 2002

(54) Identification of polynucleotides encoding novel helicobacter polypeptides in the helicobacter genome

(76) Inventors: Harold Kleanthous, Newtonville, MA (US); Amal Al-Garawi, Boston, MA (US); Charles Miller, Medford, MA (US); Jean-Francois Tomb, Baltimore, MD (US); Raymond P. Oomen, Schomberg (CA)

Correspondence Address: CLARK & ELBING LLP, 101 FEDERAL STREET, BOSTON, MA, 02110, US

(21) Appl. No.: 09/895,913

(22) Filed: Jun. 29, 2001

Related U.S. Application Data
(63) Continuation of application No. 08/881,227, filed on Jun. 24, 1997, now abandoned.

(51) Int. Cl. A61K 39/02; C07H 21/04; C12N 9/00; C12P 21/02; C12N 1/21

(52) U.S. Cl. 435/69.3; 435/252.3; 435/320.1; 424/190.1; 536/23.7; 435/183

(57) ABSTRACT

The invention provides Helicobacter polypeptides that can be used in vaccination methods for preventing or treating Helicobacter infection, and polynucleotides that encode these polypeptides.

### PRIORITY INFORMATION

[0001] This application is a continuation of, and claims priority from, U.S. Ser. No. 08/881,227, filed on Jun. 24, 1997, which is incorporated by reference herein in its entirety.

### FIELD OF THE INVENTION

[0002] The invention relates to Helicobacter antigens and corresponding polynucleotide molecules that can be used in methods to prevent or treat Helicobacter infection in mammals, such as humans.

### BACKGROUND OF THE INVENTION

[0003] Helicobacter is a genus of spiral, gram-negative bacteria that colonize the gastrointestinal tracts of mammals. Several species colonize the stomach, most notably H. pylon, H. heilmanii, H. felis, and H. mustelae. Although H. pylori is the species most commonly associated with human infection, H. heilmanii and H. felis have also been isolated from humans, but at lower frequencies than H. pylon. Helicobacter infects over 50% of adult populations in developed countries and nearly 100% in developing countries and some Pacific rim countries, making it one of the most prevalent infections worldwide.

[0004] Helicobacter is routinely recovered from gastric biopsies of humans with histological evidence of gastritis and peptic ulceration. Indeed, H. pylori is now recognized as an important pathogen of humans, in that the chronic gastritis it causes is a risk factor for the development of peptic ulcer diseases and gastric carcinoma. It is thus highly desirable to develop safe and effective vaccines for preventing and treating Helicobacter infection.

[0005] A number of Helicobacter antigens have been characterized or isolated. These include urease, which is composed of two structural subunits of approximately 30 and 67 kDa (Hu et al., Infect. Immun. 58:992, 1990; Dunn et al., J. Biol. Chem. 265:9464, 1990; Evans et al., Microbial Pathogenesis 10: 15, 1991; Labigne et al., J. Bact., 173:1920, 1991); the 87 kDa vacuolar cytotoxin (VacA) (Cover et al., J. Biol. Chem. 267:10570, 1992; Phadnis et al., Infect. Immun. 62:1557, 1994; WO 93/18150); a 128 kDa immunodominant antigen associated with the cytotoxin (CagA, also called TagA; WO 93/18150; U.S. Pat. No. 5,403,924); 13 and 58 kDa heat shock proteins HspA and HspB (Suerbaum et al., Mol. Microbiol. 14:959, 1994; WO 93/18150); a 54 kDa catalase (Hazell et al., J. Gen. Microbiol. 137:57, 1991); a 15 kDa histidine-rich protein (Hpn) (Gilbert et al., Infect. Immun. 63:2682, 1995); a 20 kDa membrane-associated lipoprotein (Kostrcynska et al., J. Bact. 176:5938, 1994); a 30 kDa outer membrane protein (Böilin et al., J. Clin. Microbiol. 33:381, 1995); a lactoferrin receptor (FR 2,724,936); and several porins, designated HopA, HopB, HopC, HopD, and HopE, which have molecular weights of 48-67 kDa (Exner et al., Infect. Immun. 63:1567, 1995; Doig et al., J. Bact. 177:5447, 1995). Some of these proteins have been proposed as potential vaccine antigens. In particular, urease is believed to be a vaccine candidate (WO 94/9823; WO 95/22987; WO 95/3824; Michetti et al., Gastroenterology 107:1002, 1994). Nevertheless, it is thought that several antigens may ultimately be necessary in a vaccine.

### SUMMARY OF THE INVENTION

[0006] The invention provides polynucleotide molecules that encode Helicobacter polypeptides, designated GHPO 15 (SEQ ID NO:2), GHPO 16 (SEQ ID NO:4), GHPO 36 (SEQ ID NO:6), GHPO 38 (SEQ ID NO:8), GHPO 52 (SEQ ID NO:10), GHPO 57 (SEQ ID NO:12), GHPO 64 (SEQ ID NO:14), GHPO 79 (SEQ ID NO:16), GHPO 84 (SEQ ID NO:18), GHPO 86 (SEQ ID NO:20), GHPO 99 (SEQ ID NO:22), GHPO 106 (SEQ ID NO:24), GHPO 118 (SEQ ID NO:26), GHPO 122 (SEQ ID NO:28), GHPO 128 (SEQ ID NO:30), GHPO 138 (SEQ ID NO:32), GHPO 153 (SEQ ID NO:34), GHPO 160 (SEQ ID NO:36), GHPO 168 (SEQ ID NO:38), GHPO 179 (SEQ ID NO:40), GHPO 189 (SEQ ID NO:42), GHPO 229 (SEQ ID NO:44), GHPO 243 (SEQ ID NO:46), GHPO 244 (SEQ ID NO:48), GHPO 251 (SEQ ID NO:50), GHPO 267 (SEQ ID NO:52), GHPO 269 (SEQ ID NO:54), GHPO 279 (SEQ ID NO:56), GHPO 284 (SEQ ID NO:58), GHPO 296 (SEQ ID NO:60), GHPO 300 (SEQ ID NO:62), GHPO 305 (SEQ ID NO:64), GHPO 319 (SEQ ID NO:66), GHPO 330 (SEQ ID NO:68), GHPO 340 (SEQ ID NO:70), GHPO 342 (SEQ ID NO:72), GHPO 344 (SEQ ID NO:74), GHPO 358 (SEQ ID NO:76), GHPO 373 (SEQ ID NO:78), GHPO 382 (SEQ ID NO:80), GHPO 384 (SEQ ID NO:82), GHPO 398 (SEQ ID NO:84), GHPO 409 (SEQ ID NO:86), GHPO 422 (SEQ ID NO:88), GHPO 430 (SEQ ID NO:90), GHPO 446 (SEQ ID NO:92), GHPO 447 (SEQ ID NO:94), GHPO 450 (SEQ ID NO:96), GHPO 451 (SEQ ID NO:98), GHPO 452 (SEQ ID NO:100), GHPO 456 (SEQ ID NO:102), GHPO 461 (SEQ ID NO:104), GHPO 476 (SEQ ID NO:106), GHPO 478 (SEQ ID NO:108), GHPO 491 (SEQ ID NO:110), GHPO 511 (SEQ ID NO:112), GHPO 519 (SEQ ID NO:114), GHPO 526 (SEQ ID NO:116), GHPO 534 (SEQ ID NO:118), GHPO 536 (SEQ ID NO:120), GHPO 542 (SEQ ID NO:122), GHPO 544 (SEQ ID NO:124), GHPO 576 (SEQ ID NO:126), GHPO 578 (SEQ ID NO:128), GHPO 580 (SEQ ID NO:130), GHPO 585 (SEQ ID NO:132), GHPO 599 (SEQ ID NO:134), GHPO 639 (SEQ ID NO:136), GHPO 642 (SEQ ID NO:138), GHPO 647 (SEQ ID NO:140), GHPO 654 (SEQ ID NO:142), GHPO 669 (SEQ ID NO:144), GHPO 710 (SEQ ID NO:146), GHPO 713 (SEQ ID NO:148), GHPO 716 (SEQ ID NO:150), GHPO 718 (SEQ ID NO:152), GHPO 726 (SEQ ID NO:154), GHPO 734 (SEQ ID NO:156), GHPO 740 (SEQ ID NO:158), GHPO 770 (SEQ ID NO:160), GHPO 782 (SEQ ID NO:162), GHPO 786 (SEQ ID NO:164), GHPO 792 (SEQ ID NO:166), GHPO 797 (SEQ ID NO:168), GHPO 816 (SEQ ID NO:170), GHPO 828 (SEQ ID NO:172), GHPO 839 (SEQ ID NO:174), GHPO 840 (SEQ ID NO:176), GHPO 842 (SEQ ID NO:178), GHPO 885 (SEQ ID NO:180), GHPO 889 (SEQ ID NO:182), GHPO 903 (SEQ ID NO:184), GHPO 912 (SEQ ID NO:186), GHPO 946 (SEQ ID NO:188), GHPO 958 (SEQ ID NO:190), GHPO 968 (SEQ ID NO:192), GHPO 987 (SEQ ID NO:194), GHPO 992 (SEQ ID NO:196), GHPO 996 (SEQ ID NO:198), GHPO 997 (SEQ ID NO:200), GHPO 1002 (SEQ ID NO:202), GHPO 1026 (SEQ ID NO:204), GHPO 1028 (SEQ ID NO:206), GHPO 1034 (SEQ ID NO:208), GHPO 1038 (SEQ ID NO:210), GHPO 1059 (SEQ ID NO:212), GHPO 1065 (SEQ ID NO:214), GHPO 1072 (SEQ ID NO:216), GHPO 1073 (SEQ ID NO:218), GHPO 1088 (SEQ ID NO:220), GHPO 1091 (SEQ ID NO:222), GHPO 1105 (SEQ ID NO:224), GHPO 1115 (SEQ ID NO:226), GHPO 1159 (SEQ ID NO:228), GHPO 1177 (SEQ ID NO:230), GHPO 1187 (SEQ ID NO:232), GHPO 1192 (SEQ ID NO:234), GHPO 1195 (SEQ ID NO:236), GHPO 1224 (SEQ ID NO:238), GHPO 1225 (SEQ ID NO:240), GHPO 1228 (SEQ ID NO:242), GHPO 1229 (SEQ ID NO:244), GHPO 1231 (SEQ ID NO:246), GHPO 1236 (SEQ ID NO:248), GHPO 1242 (SEQ ID NO:250), GHPO 1248 (SEQ ID NO:252), GHPO 1270 (SEQ ID NO:254), GHPO 1271 (SEQ ID NO:256), GHPO 1298 (SEQ ID NO:258), GHPO 1301 (SEQ ID NO:260), GHPO 1304 (SEQ ID NO:262), GHPO 1315 (SEQ ID NO:264), GHPO 1319 (SEQ ID NO:266), GHPO 1323 (SEQ ID NO:268), GHPO 1331 (SEQ ID NO:270), GHPO 1332 (SEQ ID NO:272), GHPO 1347 (SEQ ID NO:274), GHPO 1373 (SEQ ID NO:276), GHPO 1376 (SEQ ID NO:278), GHPO 1380 (SEQ ID NO:280), GHPO 1394 (SEQ ID NO:282), GHPO 1407 (SEQ ID NO:284), GHPO 1415 (SEQ ID NO:286), GHPO 1425 (SEQ ID NO:288), GHPO 1427 (SEQ ID NO:290), GHPO 1444 (SEQ ID NO:292), GHPO 1449 (SEQ ID NO:294), GHPO 1465 (SEQ ID NO:296), GHPO 1475 (SEQ ID NO:298), GHPO 1479 (SEQ ID NO:300), GHPO 1483 (SEQ ID NO:302), GHPO 1488 (SEQ ID NO:304), GHPO 1496 (SEQ ID NO:306), GHPO 1524 (SEQ ID NO:308), GHPO 1536 (SEQ ID NO:310), GHPO 1539 (SEQ ID NO:312), GHPO 1540 (SEQ ID NO:314), GHPO 1542 (SEQ ID NO:316), GHPO 1555 (SEQ ID NO:318), GHPO 1560 (SEQ ID NO:320), GHPO 1564 (SEQ ID NO:322), GHPO 1570 (SEQ ID NO:324), GHPO 1588 (SEQ ID NO:326), GHPO 1604 (SEQ ID NO:328), GHPO 1605 (SEQ ID NO:330), GHPO 1619 (SEQ ID NO:332), GHPO 1629 (SEQ ID NO:334), GHPO 1642 (SEQ ID NO:336), GHPO 1654 (SEQ ID NO:338), GHPO 1661 (SEQ ID NO:340), GHPO 1673 (SEQ ID NO:342), GHPO 1687 (SEQ ID NO:344), GHPO 1692 (SEQ ID NO:346), GHPO 1693 (SEQ ID NO:348), GHPO 1699 (SEQ ID NO:350), GHPO 1738 (SEQ ID NO:352), GHPO 1745 (SEQ ID NO:354), GHPO 1746 (SEQ ID NO:356), GHPO 1754 (SEQ ID NO:358), GHPO 1792 (SEQ ID NO:360), GHPO 1795 (SEQ ID NO:362), and GHPO 1796 (SEQ ID NO:364), which can be used, e.g., in methods to prevent, treat, or diagnose Helicobacter infection. The sequences of polynucleotides that encode these polypeptides are shown in the sequence listing (odd numbers, up to SEQ ID NO:363). Those skilled in the art will understand that the invention also includes polynucleotide molecules that encode mutants and derivatives of these polypeptides, which can result from the addition, deletion, or substitution of non-essential amino acids, as is described further below.

[0007] In addition to the polynucleotide molecules described above, the invention includes the corresponding polypeptides (i.e., polypeptides encoded by the polynucleotide molecules of the invention, or fragments thereof), and monospecific antibodies that specifically bind to these polypeptides. The polypeptides of the invention include those having the amino acid sequences shown in the sequence listing (even numbers, up to SEQ ID NO:364), as well as mature forms of proteins having sequences shown in the sequence listing in their unprocessed forms, and fragments thereof.

[0008] The present invention has many applications and includes expression cassettes, vectors, and cells transformed or transfected with the polynucleotides of the invention. Accordingly, the present invention provides (i) methods for producing polypeptides of the invention in recombinant host systems and related expression cassettes, vectors, and transformed or transfected cells; (ii) live vaccine vectors, such as pox virus, Salmonella typhimurium, and Vibrio cholerae vectors, that contain polynucleotides of the invention (such vaccine vectors being useful in, e.g., methods for preventing or treating Helicobacter infection) in combination with a diluent or carrier, and related pharmaceutical compositions and associated therapeutic and/or prophylactic methods; (iii) therapeutic and/or prophylactic methods involving administration of polynucleotide molecules, either in a naked form or formulated with a delivery vehicle, polypeptides or mixtures of polypeptides, or monospecific antibodies of the invention, and related pharmaceutical compositions; (iv) methods for detecting the presence of Helicobacter in biological samples, which can involve the use of polynucleotide molecules, monospecific antibodies, or polypeptides of the invention; and (v) methods for purifying polypeptides of the invention by antibody-based affinity chromatography.

### DETAILED DESCRIPTION

[0009] Open reading frames (ORFs) encoding new polypeptides, designated GHPO 15 (SEQ ID NO:2), GHPO 16 (SEQ ID NO:4), GHPO 36 (SEQ ID NO:6), GHPO 38 (SEQ ID NO:8), GHPO 52 (SEQ ID NO:10), GHPO 57 (SEQ ID NO:12), GHPO 64 (SEQ ID NO:14), GHPO 79 (SEQ ID NO:16), GHPO 84 (SEQ ID NO:18), GHPO 86 (SEQ ID NO:20), GHPO 99 (SEQ ID NO:22), GHPO 106 (SEQ ID NO:24), GHPO 118 (SEQ ID NO:26), GHPO 122 (SEQ ID NO:28), GHPO 128 (SEQ ID NO:30), GHPO 138 (SEQ ID NO:32), GHPO 153 (SEQ ID NO:34), GHPO 160 (SEQ ID NO:36), GHPO 168 (SEQ ID NO:38), GHPO 179 (SEQ ID NO:40), GHPO 189 (SEQ ID NO:42), GHPO 229 (SEQ ID NO:44), GHPO 243 (SEQ ID NO:46), GHPO 244 (SEQ ID NO:48), GHPO 251 (SEQ ID NO:50), GHPO 267 (SEQ ID NO:52), GHPO 269 (SEQ ID NO:54), GHPO 279 (SEQ ID NO:56), GHPO 284 (SEQ ID NO:58), GHPO 296 (SEQ ID NO:60), GHPO 300 (SEQ ID NO:62), GHPO 305 (SEQ ID NO:64), GHPO 319 (SEQ ID NO:66), GHPO 330 (SEQ ID NO:68), GHPO 340 (SEQ ID NO:70), GHPO 342 (SEQ ID NO:72), GHPO 344 (SEQ ID NO:74), GHPO 358 (SEQ ID NO:76), GHPO 373 (SEQ ID NO:78), GHPO 382 (SEQ ID NO:80), GHPO 384 (SEQ ID NO:82), GHPO 398 (SEQ ID NO:84), GHPO 409 (SEQ ID NO:86), GHPO 422 (SEQ ID NO:88), GHPO 430 (SEQ ID NO:90), GHPO 446 (SEQ ID NO:92), GHPO 447 (SEQ ID NO:94), GHPO 450 (SEQ ID NO:96), GHPO 451 (SEQ ID NO:98), GHPO 452 (SEQ ID NO:100), GHPO 456 (SEQ ID NO:102), GHPO 461 (SEQ ID NO:104), GHPO 476 (SEQ ID NO:106), GHPO 478 (SEQ ID NO:108), GHPO 491 (SEQ ID NO:110), GHPO 511 (SEQ ID NO:112), GHPO 519 (SEQ ID NO:114), GHPO 526 (SEQ ID NO:116), GHPO 534 (SEQ ID NO:118), GHPO 536 (SEQ ID NO:120), GHPO 542 (SEQ ID NO:122), GHPO 544 (SEQ ID NO:124), GHPO 576 (SEQ ID NO:126), GHPO 578 (SEQ ID NO:128), GHPO 580 (SEQ ID NO:130), GHPO 585 (SEQ ID NO:132), GHPO 599 (SEQ ID NO:134), GHPO 639 (SEQ ID NO:136), GHPO 642 (SEQ ID NO:138), GHPO 647 (SEQ ID NO:140), GHPO 654 (SEQ ID NO:142), GHPO 669 (SEQ ID NO:144), GHPO 710 (SEQ ID NO:146), GHPO 713 (SEQ ID NO:148), GHPO 716 (SEQ ID NO:150), GHPO 718 (SEQ ID NO:152), GHPO 726 (SEQ ID NO:154), GHPO 734 (SEQ ID NO:156), GHPO 740 (SEQ ID NO:158), GHPO 770 (SEQ ID NO:160), GHPO 782 (SEQ ID NO:162), GHPO 786 (SEQ ID NO:164), GHPO 792 (SEQ ID NO:166), GHPO 797 (SEQ ID NO:168), GHPO 816 (SEQ ID NO:170), GHPO 828 (SEQ ID NO:172), GHPO 839 (SEQ ID NO:174), GHPO 840 (SEQ ID NO:176), GHPO 842 (SEQ ID NO:178), GHPO 885 (SEQ ID NO:180), GHPO 889 (SEQ ID NO:182), GHPO 903 (SEQ ID NO:184), GHPO 912 (SEQ ID NO:186), GHPO 946 (SEQ ID NO:188), GHPO 958 (SEQ ID NO:190), GHPO 968 (SEQ ID NO:192), GHPO 987 (SEQ ID NO:194), GHPO 992 (SEQ ID NO:196), GHPO 996 (SEQ ID NO:198), GHPO 997 (SEQ ID NO:200), GHPO 1002 (SEQ ID NO:202), GHPO 1026 (SEQ ID NO:204), GHPO 1028 (SEQ ID NO:206), GHPO 1034 (SEQ ID NO:208), GHPO 1038 (SEQ ID NO:210), GHPO 1059 (SEQ ID NO:212), GHPO 1065 (SEQ ID NO:214), GHPO 1072 (SEQ ID NO:216), GHPO 1073 (SEQ ID NO:218), GHPO 1088 (SEQ ID NO:220), GHPO 1091 (SEQ ID NO:222), GHPO 1105 (SEQ ID NO:224), GHPO 1115 (SEQ ID NO:226), GHPO 1159 (SEQ ID NO:228), GHPO 1177 (SEQ ID NO:230), GHPO 1187 (SEQ ID NO:232), GHPO 1192 (SEQ ID NO:234), GHPO 1195 (SEQ ID NO:236), GHPO 1224 (SEQ ID NO:238), GHPO 1225 (SEQ ID NO:240), GHPO 1228 (SEQ ID NO:242), GHPO 1229 (SEQ ID NO:244), GHPO 1231 (SEQ ID NO:246), GHPO 1236 (SEQ ID NO:248), GHPO 1242 (SEQ ID NO:250), GHPO 1248 (SEQ ID NO:252), GHPO 1270 (SEQ ID NO:254), GHPO 1271 (SEQ ID NO:256), GHPO 1298 (SEQ ID NO:258), GHPO 1301 (SEQ ID NO:260), GHPO 1304 (SEQ ID NO:262), GHPO 1315 (SEQ ID NO:264), GHPO 1319 (SEQ ID NO:266), GHPO 1323 (SEQ ID NO:268), GHPO 1331 (SEQ ID NO:270), GHPO 1332 (SEQ ID NO:272), GHPO 1347 (SEQ ID NO:274), GHPO 1373 (SEQ ID NO:276), GHPO 1376 (SEQ ID NO:278), GHPO 1380 (SEQ ID NO:280), GHPO 1394 (SEQ ID NO:282), GHPO 1407 (SEQ ID NO:284), GHPO 1415 (SEQ ID NO:286), GHPO 1425 (SEQ ID NO:288), GHPO 1427 (SEQ ID NO:290), GHPO 1444 (SEQ ID NO:292), GHPO 1449 (SEQ ID NO:294), GHPO 1465 (SEQ ID NO:296), GHPO 1475 (SEQ ID NO:298), GHPO 1479 (SEQ ID NO:300), GHPO 1483 (SEQ ID NO:302), GHPO 1488 (SEQ ID NO:304), GHPO 1496 (SEQ ID NO:306), GHPO 1524 (SEQ ID NO:308), GHPO 1536 (SEQ ID NO:310), GHPO 1539 (SEQ ID NO:312), GHPO 1540 (SEQ ID NO:314), GHPO 1542 (SEQ ID NO:316), GHPO 1555 (SEQ ID NO:318), GHPO 1560 (SEQ ID NO:320), GHPO 1564 (SEQ ID NO:322), GHPO 1570 (SEQ ID NO:324), GHPO 1588 (SEQ ID NO:326), GHPO 1604 (SEQ ID NO:328), GHPO 1605 (SEQ ID NO:330), GHPO 1619 (SEQ ID NO:332), GHPO 1629 (SEQ ID NO:334), GHPO 1642 (SEQ ID NO:336), GHPO 1654 (SEQ ID NO:338), GHPO 1661 (SEQ ID NO:340), GHPO 1673 (SEQ ID NO:342), GHPO 1687 (SEQ ID NO:344), GHPO 1692 (SEQ ID NO:346), GHPO 1693 (SEQ ID NO:348), GHPO 1699 (SEQ ID NO:350), GHPO 1738 (SEQ ID NO:352), GHPO 1745 (SEQ ID NO:354), GHPO 1746 (SEQ ID NO:356), GHPO 1754 (SEQ ID NO:358), GHPO 1792 (SEQ ID NO:360), GHPO 1795 (SEQ ID NO:362), and GHPO 1796 (SEQ ID NO:364) have been identified in the H. pylori genome. These polypeptides can be used, for example, in vaccination methods for preventing or treating Helicobacter infection. Some of the new polypeptides are secreted polypeptides that can be produced in their mature forms (i.e., as polypeptides that have been exported through class II or class III secretion pathways) or as precursors that include signal peptides, which can be removed in the course of excretion/secretion by cleavage at the N-terminal end of the mature form. (The cleavage site is located at the C-terminal end of the signal peptide, adjacent to the mature form.)

[0010] According to a first aspect of the invention, there are provided isolated polynucleotides that encode the precursor and mature forms of the Helicobacter GHPO proteins listed above. Examples of such polynucleotides are those encoding GHPO 15 (SEQ ID NO:1), GHPO 16 (SEQ ID NO:3), GHPO 36 (SEQ ID NO:5), GHPO 38 (SEQ ID NO:7), GHPO 52 (SEQ ID NO:9), GHPO 57 (SEQ ID NO:11), GHPO 64 (SEQ ID NO:13), GHPO 79 (SEQ ID NO:15), GHPO 84 (SEQ ID NO:17), GHPO 86 (SEQ ID NO:19), GHPO 99 (SEQ ID NO:21), GHPO 106 (SEQ ID NO:23), GHPO 118 (SEQ ID NO:25), GHPO 122 (SEQ ID NO:27), GHPO 128 (SEQ ID NO:29), GHPO 138 (SEQ ID NO:31), GHPO 153 (SEQ ID NO:33), GHPO 160 (SEQ ID NO:35), GHPO 168 (SEQ ID NO:37), GHPO 179 (SEQ ID NO:39), GHPO 189 (SEQ ID NO:41), GHPO 229 (SEQ ID NO:43), GHPO 243 (SEQ ID NO:45), GHPO 244 (SEQ ID NO:47), GHPO 251 (SEQ ID NO:49), GHPO 267 (SEQ ID NO:51), GHPO 269 (SEQ ID NO:53), GHPO 279 (SEQ ID NO:55), GHPO 284 (SEQ ID NO:57), GHPO 296 (SEQ ID NO:59), GHPO 300 (SEQ ID NO:61), GHPO 305 (SEQ ID NO:63), GHPO 319 (SEQ ID NO:65), GHPO 330 (SEQ ID NO:67), GHPO 340 (SEQ ID NO:69), GHPO 342 (SEQ ID NO:71), GHPO 344 (SEQ ID NO:73), GHPO 358 (SEQ ID NO:75), GHPO 373 (SEQ ID NO:77), GHPO 382 (SEQ ID NO:79), GHPO 384 (SEQ ID NO:81), GHPO 398 (SEQ ID NO:83), GHPO 409 (SEQ ID NO:85), GHPO 422 (SEQ ID NO:87), GHPO 430 (SEQ ID NO:89), GHPO 446 (SEQ ID NO:91), GHPO 447 (SEQ ID NO:93), GHPO 450 (SEQ ID NO:95), GHPO 451 (SEQ ID NO:97), GHPO 452 (SEQ ID NO:99), GHPO 456 (SEQ ID NO:I01), GHPO 461 (SEQ ID NO:103), GHPO 476 (SEQ ID NO:105), GHPO 478 (SEQ ID NO:107), GHPO 491 (SEQ ID NO:109), GHPO 511 (SEQ ID NO:111), GHPO 519 (SEQ ID NO:113), GHPO 526 (SEQ ID NO:115), GHPO 534 (SEQ ID NO:117), GHPO 536 (SEQ ID NO:119), GHPO 542 (SEQ ID NO:121), GHPO 544 (SEQ ID NO:123), GHPO 576 (SEQ ID NO:125), GHPO 578 (SEQ ID NO:127), GHPO 580 (SEQ ID NO:129), GHPO 585 (SEQ ID NO:131), GHPO 599 (SEQ ID NO:133), GHPO 639 (SEQ ID NO:135), GHPO 642 (SEQ ID NO:137), GHPO 647 (SEQ ID NO:139), GHPO 654 (SEQ ID NO:141), GHPO 669 (SEQ ID NO:143), GHPO 710 (SEQ ID NO:145), GHPO 713 (SEQ ID NO:147), GHPO 716 (SEQ ID NO:149), GHPO 718 (SEQ ID NO:151), GHPO 726 (SEQ ID NO:153), GHPO 734 (SEQ ID NO:155), GHPO 740 (SEQ ID NO:157), GHPO 770 (SEQ ID NO:159), GHPO 782 (SEQ ID NO:161), GHPO 786 (SEQ ID NO:163), GHPO 792 (SEQ ID NO:165), GHPO 797 (SEQ ID NO:167), GHPO 816 (SEQ ID NO:169), GHPO 828 (SEQ ID NO:171), GHPO 839 (SEQ ID NO:173), GHPO 840 (SEQ ID NO:175), GHPO 842 (SEQ ID NO:177), GHPO 885 (SEQ ID NO:179), GHPO 889 (SEQ ID NO:181), GHPO 903 (SEQ ID NO:183), GHPO 912 (SEQ ID NO:185), GHPO 946 (SEQ ID NO:187), GHPO 958 (SEQ ID NO:189), GHPO 968 (SEQ ID NO:191), GHPO 987 (SEQ ID NO:193), GHPO 992 (SEQ ID NO:195), GHPO 996 (SEQ ID NO:197), GHPO 997 (SEQ ID NO:199), GHPO 1002 (SEQ ID NO:201), GHPO 1026 (SEQ ID NO:203), GHPO 1028 (SEQ ID NO:205), GHPO 1034 (SEQ ID NO:207), GHPO 1038 (SEQ ID NO:209), GHPO 1059 (SEQ ID NO:211), GHPO 1065 (SEQ ID NO:213), GHPO 1072 (SEQ ID NO:215), GHPO 1073 (SEQ ID NO:217), GHPO 1088 (SEQ ID NO:219), GHPO 1091 (SEQ ID NO:221), GHPO 1105 (SEQ ID NO:223), GHPO 1115 (SEQ ID NO:225), GHPO 1159 (SEQ ID NO:227), GHPO 1177 (SEQ ID NO:229), GHPO 1187 (SEQ ID NO:231), GHPO 1192 (SEQ ID NO:233), GHPO 1195 (SEQ ID NO:235), GHPO 1224 (SEQ ID NO:237), GHPO 1225 (SEQ ID NO:239), GHPO 1228 (SEQ ID NO:241), GHPO 1229 (SEQ ID NO:243), GHPO 1231 (SEQ ID NO:245), GHPO 1236 (SEQ ID NO:247), GHPO 1242 (SEQ ID NO:249), GHPO 1248 (SEQ ID NO:251), GHPO 1270 (SEQ ID NO:253), GHPO 1271 (SEQ ID NO:255), GHPO 1298 (SEQ ID NO:257), GHPO 1301 (SEQ ID NO:259), GHPO 1304 (SEQ ID NO:261), GHPO 1315 (SEQ ID NO:263), GHPO 1319 (SEQ ID NO:265), GHPO 1323 (SEQ ID NO:267), GHPO 1331 (SEQ ID NO:269), GHPO 1332 (SEQ ID NO:271), GHPO 1347 (SEQ ID NO:273), GHPO 1373 (SEQ ID NO:275), GHPO 1376 (SEQ ID NO:277), GHPO 1380 (SEQ ID NO:279), GHPO 1394 (SEQ ID NO:281), GHPO 1407 (SEQ ID NO:283), GHPO 1415 (SEQ ID NO:285), GHPO 1425 (SEQ ID NO:287), GHPO 1427 (SEQ ID NO:289), GHPO 1444 (SEQ ID NO:291), GHPO 1449 (SEQ ID NO:293), GHPO 1465 (SEQ ID NO:295), GHPO 1475 (SEQ ID NO:297), GHPO 1479 (SEQ ID NO:299), GHPO 1483 (SEQ ID NO:301), GHPO 1488 (SEQ ID NO:303), GHPO 1496 (SEQ ID NO:305), GHPO 1524 (SEQ ID NO:307), GHPO 1536 (SEQ ID NO:309), GHPO 1539 (SEQ ID NO:311), GHPO 1540 (SEQ ID NO:313), GHPO 1542 (SEQ ID NO:315), GHPO 1555 (SEQ ID NO:317), GHPO 1560 (SEQ ID NO:319), GHPO 1564 (SEQ ID NO:321), GHPO 1570 (SEQ ID NO:323), GHPO 1588 (SEQ ID NO:325), GHPO 1604 (SEQ ID NO:327), GHPO 1605 (SEQ ID NO:329), GHPO 1619 (SEQ ID NO:331), GHPO 1629 (SEQ ID NO:333), GHPO 1642 (SEQ ID NO:335), GHPO 1654 (SEQ ID NO:337), GHPO 1661 (SEQ ID NO:339), GHPO 1673 (SEQ ID NO:341), GHPO 1687 (SEQ ID NO:343), GHPO 1692 (SEQ ID NO:345), GHPO 1693 (SEQ ID NO:347), GHPO 1699 (SEQ ID NO:349), GHPO 1738 (SEQ ID NO:351), GHPO 1745 (SEQ ID NO:353), GHPO 1746 (SEQ ID NO:355), GHPO 1754 (SEQ ID NO:357), GHPO 1792 (SEQ ID NO:359), GHPO 1795 (SEQ ID NO:361), and GHPO 1796 (SEQ ID NO:363).

[0011] An isolated polynucleotide of the invention encodes (i) a polypeptide having an amino acid sequence that is homologous to a Helicobacter amino acid sequence of a polypeptide, the Helicobacter amino acid sequence being selected from the group consisting of the amino acid sequences shown in the sequence listing (even numbers, up to SEQ ID NO:364), or (ii) a derivative of the polypeptide.

[0012] In addition to the full-length polypeptides encoded by the polynucleotides of the invention, as set forth above, polynucleotides included in the invention can also encode polypeptides that lack signal sequences, as well as other polypeptide or peptide fragments of the full-length polypeptides.

[0013] The term “isolated polynucleotide” is defined as a polynucleotide that is removed from the environment in which it naturally occurs. For example, a naturally-occurring DNA molecule present in the genome of a living bacteria or as part of a gene bank is not isolated, but the same molecule, separated from the remaining part of the bacterial genome, as a result of, e.g., a cloning event (amplification), is “isolated.” Typically, an isolated DNA molecule is free from DNA regions (e.g., coding regions) with which it is immediately contiguous, at the 5′ or 3′ ends, in the naturally occurring genome. Such isolated polynucleotides can be part of a vector or a composition and still be isolated, as such a vector or composition is not part of its natural environment.

[0014] A polynucleotide of the invention can consist of RNA or DNA (e.g., cDNA, genomic DNA, or synthetic DNA), or modifications or combinations of RNA or DNA. The polynucleotide can be double-stranded or single-stranded and, if single-stranded, can be the coding (sense) strand or the non-coding (anti-sense) strand. The sequences that encode polypeptides of the invention, as shown in the sequence listing (even numbers, up to SEQ ID NO:364), can be (a) the coding sequence as shown in any of the nucleotide sequences of the sequence listing (odd numbers, up to SEQ ID NO:363); (b) a ribonucleotide sequence derived by transcription of (a); or (c) a different coding sequence that, as a result of the redundancy or degeneracy of the genetic code, encodes the same polypeptides as the polynucleotide molecules having the sequences illustrated in any of the nucleotide sequences of the sequence listing (odd numbers, up to SEQ ID NO:363). The polypeptide can be one that is naturally secreted or excreted by, e.g., H. felis, H. mustelae, H. heilmanii, or H. pylon.

[0015] By “polypeptide” or “protein” is meant any chain of amino acids, regardless of length or post-translational modification (e.g., glycosylation or phosphorylation). Both terms are used interchangeably in the present application.

[0016] By “homologous amino acid sequence” is meant an amino acid sequence that differs from an amino acid sequence shown in the sequence listing (even numbers, up to SEQ ID NO:364), or an amino acid sequence encoded by a nucleotide sequence shown in the sequence listing (odd numbers, up to SEQ ID NO:363), by one or more non-conservative amino acid substitutions, deletions, or additions located at positions at which they do not destroy the specific antigenicity of the polypeptide. Preferably, such a sequence is at least 75%, more preferably at least 80%, and most preferably at least 90% identical to an amino acid sequence shown in the sequence listing (even numbers, up to SEQ ID NO:364). Homologous amino acid sequences include sequences that are identical or substantially identical to an amino acid sequence as shown in the sequence listing (even numbers, up to SEQ ID NO:364). By “amino acid sequence that is substantially identical” is meant a sequence that is at least 90%, preferably at least 95%, more preferably at least 97%, and most preferably at least 99% identical to an amino acid sequence of reference and that differs from the sequence of reference, if at all, by a majority of conservative amino acid substitutions.

[0017] Conservative amino acid substitutions typically include substitutions among amino acids of the same class. These classes include, for example, amino acids having uncharged polar side chains, such as asparagine, glutamine, serine, threonine, and tyrosine; amino acids having basic side chains, such as lysine, arginine, and histidine; amino acids having acidic side chains, such as aspartic acid and glutamic acid; and amino acids having nonpolar side chains, such as glycine, alanine, valine, leucine, isoleucine, proline, phenylalanine, methionine, tryptophan, and cysteine.

[0018] Homology can be measured using sequence analysis software (e.g., Sequence Analysis Software Package of the Genetics Computer Group, University of Wisconsin Biotechnology Center, 1710 University Avenue, Madison, Wis. 53705). Similar amino acid sequences are aligned to obtain the maximum degree of homology (i.e., identity). To this end, it may be necessary to artificially introduce gaps into the sequence. Once the optimal alignment has been set up, the degree of homology (i.e., identity) is established by recording all of the positions in which the amino acids of both sequences are identical, relative to the total number of positions.

[0019] Homologous polynucleotide sequences are defined in a similar way. Preferably, a homologous sequence is one that is at least 45%, more preferably at least 60%, and most preferably at least 85% identical to a coding sequence of any of the nucleotide sequences set forth in the sequence listing (odd numbers, up to SEQ ID NO:363).

[0020] Polypeptides having a sequence homologous to any one of the sequences shown in the sequence listing (even numbers, up to SEQ ID NO:364), include naturally-occurring allelic variants, as well as mutants or any other non-naturally occurring variants that are analogous in terms of antigenicity, to a polypeptide having a sequence as shown in the sequence listing (even numbers, up to SEQ ID NO:364).

[0021] As is known in the art, an allelic variant is an alternate form of a polypeptide that is characterized as having a substitution, deletion, or addition of one or more amino acids that does not alter the biological function of the polypeptide. By “biological function” is meant a function of the polypeptide in the cells in which it naturally occurs, even if the function is not necessary for the growth or survival of the cells. For example, the biological function of a porin is to allow the entry into cells of compounds present in the extracellular medium. The biological function is distinct from the antigenic function. A polypeptide can have more than one biological function.

[0022] Allelic variants are very common in nature. For example, a bacterial species, e.g., H. pylori, is usually represented by a variety of strains that differ from each other by minor allelic variations. Indeed, a polypeptide that fulfills the same biological function in different strains can have an amino acid sequence that is not identical in each of the strains. Such an allelic variation can be equally reflected at the polynucleotide level.

[0023] Support for the use of allelic variants of polypeptide antigens comes from, e.g., studies of the Helicobacter urease antigen. The amino acid sequence of Helicobacter urease varies widely from species to species, yet cross-species protection occurs, indicating that the urease molecule, when used as an immunogen, is highly tolerant of amino acid variations. Even among different strains of the single species H. pylori, there are amino acid sequence variations.

[0024] For example, although the amino acid sequences of the UreA and UreB subunits of H. pylori and H. felis ureases differ from one another by 26.5% and 11.8%, respectively (Ferrero et al., Molecular Microbiology 9(2):323-333, 1993), it has been shown that H. pylori urease protects mice from H. felis infection (Michetti et al., Gastroenterology 107:1002, 1994). In addition, it has been shown that the individual structural subunits of urease, UreA and UreB, which contain distinct amino acid sequences, are both protective antigens against Helicobacter infection (Michetti et al., supra). Similarly, Cuenca et al. (Gastroenterology 110: 1770, 1996) showed that therapeutic immunization of H. mustelae-infected ferrets with H. pylori urease was effective at eradicating H. mustelae infection. Further, several urease variants have been reported to be effective vaccine antigens, including, e.g., recombinant UreA+UreB apoenzyme expressed from pORV142 (UreA and UreB sequences derived from H. pylori strain CPM630; Lee et al., J. Infect. Dis.172:161, 1995); recombinant UreA+UreB apoenzyme expressed from pORV214 (UreA and UreB sequences differ from H. pylori strain CPM630 by one and two amino acid changes, respectively; Lee et al., supra, 1995); a UreA-glutathione-S-transferase fusion protein (UreA sequence from H. pylori strain ATCC 43504; Thomas et al., Acta Gastro-Enterologica Belgica 56:54, 1993); UreA+UreB holoenzyme purified from H. pylori strain NCTC11637 (Marchetti et al., Science 267:1655, 1995); a UreA-MBP fusion protein (UreA from H. pylori strain 85P; Ferrero et al., Infection and Immunity 62:4981, 1994); a UreB-MBP fusion protein (UreB from H. pylori strain 85P; Ferrero et al., supra); a UreA-MBP fusion protein (UreA from H. felis strain ATCC 49179; Ferrero et al., supra); a UreB-MBP fusion protein (UreB from H. felis strain ATCC 49179; Ferrero et al., supra); and a 37 kDa fragment of UreB containing amino acids 220-569 (Dore-Davin et al., “A 37 kD fragment of UreB is sufficient to confer protection against Helicobacter felis infection in mice”). Finally, Thomas et al. (supra) showed that oral immunization of mice with crude sonicates of H. pylori protected mice from subsequent challenge with H. felis.

[0025] Polynucleotides, e.g., DNA molecules, encoding allelic variants can easily be obtained by polymerase chain reaction (PCR) amplification of genomic bacterial DNA extracted by conventional methods. This involves the use of synthetic oligonucleotide primers matching sequences that are upstream and downstream of the 5′ and 3′ ends of the coding region. Suitable primers can be designed based on the nucleotide sequence information provided in the sequence listing (odd numbers, up to SEQ ID NO:363). Typically, a primer consists of 10 to 40, preferably 15 to 25 nucleotides. It can also be advantageous to select primers containing C and G nucleotides in proportions sufficient to ensure efficient hybridization, e.g., an amount of C and G nucleotides of at least 40%, preferably 50%, of the total nucleotide amount. Those skilled in the art can readily design primers that can be used to isolate the polynucleotides of the invention from different Helicobacter strains. Experimental conditions for carrying out PCR can readily be determined by one skilled in the art and an illustration of carrying out PCR is provided in Example 2. As is well known in the art, restriction endonuclease recognition sites that contain, typically, 4 to 6 nucleotides (for example, the sequences 5′-GGATCC-3′ (BamHI) or 5′-CTCGAG-3′ (XhoI)), can be included on the 5′ ends of the primers. Restriction sites can be selected by those skilled in the art so that the amplified DNA can be conveniently cloned into an appropriately digested vector, such as a plasmid.

[0026] Useful homologs that do not occur naturally can be designed using known methods for identifying regions of an antigen that are likely to be tolerant of amino acid sequence changes and/or deletions. For example, sequences of the antigen from different species can be compared to identify conserved sequences.

[0027] Polypeptide derivatives that are encoded by polynucleotides of the invention include, e.g., fragments, polypeptides having large internal deletions derived from full-length polypeptides, and fusion proteins. Polypeptide fragments of the invention can be derived from a polypeptide having a sequence homologous to any of the sequences of the sequence listing (even numbers, up to SEQ ID NO:364), to the extent that the fragments retain the substantial antigenicity of the parent polypeptide (specific antigenicity). Polypeptide derivatives can also be constructed by large internal deletions that remove a substantial part of the parent polypeptide, while retaining specific antigenicity. Generally, polypeptide derivatives should be about at least 12 amino acids in length to maintain antigenicity. Advantageously, they can be at least 20 amino acids, preferably at least 50 amino acids, more preferably at least 75 amino acids, and most preferably at least 100 amino acids in length.

[0028] Useful polypeptide derivatives, e.g., polypeptide fragments, can be designed using computer-assisted analysis of amino acid sequences in order to identify sites in protein antigens having potential as surface-exposed, antigenic regions (Hughes et al., Infect. Immun. 60(9):3497, 1992). For example, the Laser Gene Program from DNA Star can be used to obtain hydrophilicity, antigenic index, and intensity index plots for the polypeptides of the invention. This program can also be used to obtain information about homologies of the polypeptides with known protein motifs. One skilled in the art can readily use the information provided in such plots to select peptide fragments for use as vaccine antigens. For example, fragments spanning regions of the plots in which the antigenic index is relatively high can be selected. One can also select fragments spanning regions in which both the antigenic index and the intensity plots are relatively high. Fragments containing conserved sequences, particularly hydrophilic conserved sequences, can also be selected.

[0029] Polypeptide fragments and polypeptides having large internal deletions can be used for revealing epitopes that are otherwise masked in the parent polypeptide and that may be of importance for inducing a protective T cell-dependent immune response. Deletions can also remove immunodominant regions of high variability among strains.

[0030] It is an accepted practice in the field of immunology to use fragments and variants of protein immunogens as vaccines, as all that is required to induce an immune response to a protein is a small (e.g., 8 to 10 amino acids) immunogenic region of the protein. This has been done for a number of vaccines against pathogens other than Helicobacter. For example, short synthetic peptides corresponding to surface-exposed antigens of pathogens such as murine mammary tumor virus (peptide containing 11 amino acids; Dion et al., Virology 179:474-477, 1990), Semliki Forest virus (peptide containing 16 amino acids; Snijders et al., J. Gen. Virol. 72:557-565, 1991), and canine parvovirus (2 overlapping peptides, each containing 15 amino acids; Langeveld et al., Vaccine 12(15):1473-1480, 1994) have been shown to be effective vaccine antigens against their respective pathogens.

[0031] Polynucleotides encoding polypeptide fragments and polypeptides having large internal deletions can be constructed using standard methods (see, e.g., Ausubel et al., Current Protocols in Molecular Biology, John Wiley & Sons Inc., 1994), for example, by PCR, including inverse PCR, by restriction enzyme treatment of the cloned DNA molecules, or by the method of Kunkel et al. (Proc. Natl. Acad. Sci. U.S.A. 82:448, 1985; biological material available at Stratagene).

[0032] A polypeptide derivative can also be produced as a fusion polypeptide that contains a polypeptide or a polypeptide derivative of the invention fused, e.g., at the N- or C-terminal end, to any other polypeptide (hereinafter referred to as a peptide tail). Such a product can be easily obtained by translation of a genetic fusion, i.e., a hybrid gene. Vectors for expressing fusion polypeptides are commercially available, and include the pMal-c2 or pMal-p2 systems of New England Biolabs, in which the peptide tail is a maltose binding protein, the glutathione-S-transferase system of Pharmacia, or the His-Tag system available from Novagen. These and other expression systems provide convenient means for further purification of polypeptides and derivatives of the invention.

[0033] Another particular example of fusion polypeptides included in invention includes a polypeptide or polypeptide derivative of the invention fused to a polypeptide having adjuvant activity, such as, e.g., subunit B of either cholera toxin or E. coli heat-labile toxin. Several possibilities can be used for producing such fusion proteins. First, the polypeptide of the invention can be fused to the N-terminal end or, preferably, to the C-terminal end of the polypeptide having adjuvant activity. Second, a polypeptide fragment of the invention can be fused within the amino acid sequence of the polypeptide having adjuvant activity. Spacer sequences can also be included, if desired.

[0034] As stated above, the polynucleotides of the invention encode Helicobacter polypeptides in precursor or mature form. They can also encode hybrid precursors containing heterologous signal peptides, which can mature into polypeptides of the invention. By “heterologous signal peptide” is meant a signal peptide that is not found in the naturally-occurring precursor of a polypeptide of the invention.

[0035] A polynucleotide of the invention hybridizes, preferably under stringent conditions, to a polynucleotide having a sequence as shown in the sequence listing (odd numbers, up to SEQ ID NO:363). Hybridization procedures are, e.g., described by Ausubel et al. (supra); Silhavy et al. (Experiments with Gene Fusions, Cold Spring Harbor Laboratory Press, Cold Spring Harbor, N.Y., 1984); and Davis et al. (A Manual for Genetic Engineering: Advanced Bacterial Genetics, Cold Spring Harbor Laboratory Press, Cold Spring Harbor, N.Y., 1980). Important parameters that can be considered for optimizing hybridization conditions are reflected in the following formula, which facilitates calculation of the melting temperature (Tm), which is the temperature above which two complementary DNA strands separate from one another (Casey et al., Nucl. Acid Res. 4:1539, 1977): Tm=81.5+0.5×(% G+C)+1.6 log (positive ion concentration) −0.6×(% formamide). Under appropriate stringency conditions, hybridization temperature (Th) is approximately 20 to 40° C., 20 to 25° C., or, preferably, 30 to 40° C. below the calculated Tm. Those skilled in the art will understand that optimal temperature and salt conditions can be readily determined empirically in preliminary experiments using conventional procedures. For example, stringent conditions can be achieved, both for pre-hybridizing and hybridizing incubations, (i) within 4-16 hours at 42° C., in 6×SSC containing 50% formamide or (ii) within 4-16 hours at 65° C. in an aqueous 6×SSC solution (1 M NaCl, 0.1 M sodium citrate (pH 7.0)). For polynucleotides containing 30 to 600 nucleotides, the above formula is used and then is corrected by subtracting (600/polynucleotide size in base pairs). Stringency conditions are defined by a Th that is 5 to 10° C. below Tm.

[0036] Hybridization conditions with oligonucleotides shorter than 20-30 bases do not precisely follow the rules set forth above. In such cases, the formula for calculating the Tm is as follows: Tm=4×(G+C)+2(A+T). For example, an 18 nucleotide fragment of 50% G+C would have an approximate Tm of 54° C.

[0037] A polynucleotide molecule of the invention, containing RNA, DNA, or modifications or combinations thereof, can have various applications. For example, a polynucleotide molecule can be used (i) in a process for producing the encoded polypeptide in a recombinant host system, (ii) in the construction of vaccine vectors such as poxviruses, which are further used in methods and compositions for preventing and/or treating Helicobacter infection, (iii) as a vaccine agent, in a naked form or formulated with a delivery vehicle and, (iv) in the construction of attenuated Helicobacter strains that can over-express a polynucleotide of the invention or express it in a non-toxic, mutated form.

[0038] According to a second aspect of the invention, there is therefore provided (i) an expression cassette containing a polynucleotide molecule of the invention placed under the control of elements (e.g., a promoter) required for expression; (ii) an expression vector containing an expression cassette of the invention; (iii) a procaryotic or eucaryotic cell transformed or transfected with an expression cassette and/or vector of the invention, as well as (iv) a process for producing a polypeptide or polypeptide derivative encoded by a polynucleotide of the invention, which involves culturing a procaryotic or eucaryotic cell transformed or transfected with an expression cassette and/or vector of the invention, under conditions that allow expression of the polynucleotide molecule of the invention and, recovering the encoded polypeptide or polypeptide derivative from the cell culture.

[0039] A recombinant expression system can be selected from procaryotic and eucaryotic hosts. Eucaryotic hosts include, for example, yeast cells (e.g., Saccharomyces cerevisiae or Pichia Pastoris), mammalian cells (e.g., COS1, NIH3T3, or JEG3 cells), arthropods cells (e.g., Spodoptera frugiperda (SF9) cells), and plant cells. Preferably, a procaryotic host such as E. coli is used. Bacterial and eucaryotic cells are available from a number of different sources that are known to those skilled in the art, e.g., the American Type Culture Collection (ATCC; Rockville, Md.).

[0040] The choice of the expression cassette will depend on the host system selected, as well as the features desired for the expressed polypeptide. For example, it may be useful to produce a polypeptide of the invention in a particular lipidated form or any other form. Typically, an expression cassette includes a constitutive or inducible promoter that is functional in the selected host system; a ribosome binding site; a start codon (ATG); if necessary, a region encoding a signal peptide, e.g., a lipidation signal peptide; a polynucleotide molecule of the invention; a stop codon; and, optionally, a 3′ terminal region (translation and/or transcription terminator). The signal peptide-encoding region is adjacent to the polynucleotide of the invention and is placed in the proper reading frame. The signal peptide-encoding region can be homologous or heterologous to the polynucleotide molecule encoding the mature polypeptide and it can be specific to the secretion apparatus of the host used for expression. The open reading frame constituted by the polynucleotide molecule of the invention, alone or together with the signal peptide, is placed under the control of the promoter so that transcription and translation occur in the host system. Promoters and signal peptide-encoding regions are widely known and available to those skilled in the art and include, for example, the promoter of Salmonella typhimurium (and derivatives) that is inducible by arabinose (promoter araB) and is functional in Gram-negative bacteria such as E. coli (U.S. Pat. No. 5,028,530; Cagnon et al., Protein Engineering 4(7):843, 1991); the promoter of the bacteriophage T7 RNA polymerase gene, which is functional in a number of E. coli strains expressing T7 polymerase (U.S. Pat. No. 4,952,496); the OspA lipidation signal peptide; and RlpB lipidation signal peptide (Takase et al., J. Bact. 169:5692, 1987).

[0041] The expression cassette is typically part of an expression vector, which is selected for its ability to replicate in the chosen expression system. Expression vectors (e.g., plasmids or viral vectors) can be chosen from, for example, those described in Pouwels et al. (Cloning Vectors: A Laboratory Manual, 1985, Supp. 1987) and can purchased from various commercial sources. Methods for transforming or transfecting host cells with expression vectors are well known in the art and will depend on the host system selected, as described in Ausubel et al. (supra).

[0042] Upon expression, a recombinant polypeptide of the invention (or a polypeptide derivative) is produced and remains in the intracellular compartment, is secreted/excreted in the extracellular medium or in the periplasmic space, or is embedded in the cellular membrane. The polypeptide can then be recovered in a substantially purified form from the cell extract or from the supernatant after centrifugation of the cell culture. Typically, the recombinant polypeptide can be purified by antibody-based affinity purification or by any other method known to a person skilled in the art, such as by genetic fusion to a small affinity-binding domain. Antibody-based affinity purification methods are also available for purifying a polypeptide of the invention extracted from a Helicobacter strain. Antibodies useful for immunoaffinity purification of the polypeptides of the invention can be obtained using methods described below.

[0043] Polynucleotides of the invention can also be used in DNA vaccination methods, using either a viral or bacterial host as gene delivery vehicle (live vaccine vector) or administering the gene in a free form, e.g., inserted into a plasmid. Therapeutic or prophylactic efficacy of a polynucleotide of the invention can be evaluated as is described below.

[0044] Accordingly, in a third aspect of the invention, there is provided (i) a vaccine vector such as a poxvirus, containing a polynucleotide molecule of the invention placed under the control of elements required for expression; (ii) a composition of matter containing a vaccine vector of the invention, together with a diluent or carrier; (iii) a pharmaceutical composition containing a therapeutically or prophylactically effective amount of a vaccine vector of the invention; (iv) a method for inducing an immune response against Helicobacter in a mammal (e.g., a human; alternatively, the method can be used in veterinary applications for treating or preventing Helicobacter infection of animals, e.g., cats or birds), which involves administering to the mammal an immunogenically effective amount of a vaccine vector of the invention to elicit an immune response, e.g., a protective or therapeutic immune response to Helicobacter; and (v) a method for preventing and/or treating a Helicobacter (e.g., H. pylori H. felis, H. mustelae, or H. heilmanii) infection, which involves administering a prophylactic or therapeutic amount of a vaccine vector of the invention to an individual in need. Additionally, the third aspect of the invention encompasses the use of a vaccine vector of the invention in the preparation of a medicament for preventing and/or treating Helicobacter infection.

[0045] A vaccine vector of the invention can express one or several polypeptides or derivatives of the invention, as well as at least one additional Helicobacter antigen such as a urease apoenzyme or a subunit, fragment, homolog, mutant, or derivative thereof. In addition, it can express a cytokine, such as interleukin-2 (IL-2) or interleukin-12 (IL-12), that enhances the immune response. Thus, a vaccine vector can include an additional polynucleotide molecules encoding, e.g., urease subunit A, B, or both, or a cytokine, placed under the control of elements required for expression in a mammalian cell.

[0046] Alternatively, a composition of the invention can include several vaccine vectors, each of which being capable of expressing a polypeptide or derivative of the invention. A composition can also contain a vaccine vector capable of expressing an additional Helicobacter antigen such as urease apoenzyme, a subunit, fragment, homolog, mutant, or derivative thereof, or a cytokine such as IL-2 or IL-12.

[0047] In vaccination methods for treating or preventing infection in a mammal, a vaccine vector of the invention can be administered by any conventional route in use in the vaccine field, for example, to a mucosal (e.g., ocular, intranasal, oral, gastric, pulmonary, intestinal, rectal, vaginal, or urinary tract) surface or via a parenteral (e.g., subcutaneous, intradermal, intramuscular, intravenous, or intraperitoneal) route. Preferred routes depend upon the choice of the vaccine vector. The administration can be achieved in a single dose or repeated at intervals. The appropriate dosage depends on various parameters that are understood by those skilled in the art, such as the nature of the vaccine vector itself, the route of administration, and the condition of the mammal to be vaccinated (e.g., the weight, age, and general health of the mammal).

[0048] Live vaccine vectors that can be used in the invention include viral vectors, such as adenoviruses and poxviruses, as well as bacterial vectors, e.g., Shigella, Salmonella, Vibrio cholerae, Lactobacillus, Bacille bilié de Calmette-Guérin (BCG), and Streptococcus. An example of an adenovirus vector, as well as a method for constructing an adenovirus vector capable of expressing a polynucleotide molecule of the invention, is described in U.S. Pat. No. 4,920,209. Poxvirus vectors that can be used in the invention include, e.g., vaccinia and canary pox viruses, which are described in U.S. Pat. No. 4,722,848 and U.S. Pat. No. 5,364,773, respectively (also see, e.g., Tartaglia et al., Virology 188:217, 1992, for a description of a vaccinia virus vector, and Taylor et al, Vaccine 13:539, 1995, for a description of a canary poxvirus vector). Poxvirus vectors capable of expressing a polynucleotide of the invention can be obtained by homologous recombination, as described in Kieny et al. (Nature 312:163, 1984) so that the polynucleotide of the invention is inserted in the viral genome under appropriate conditions for expression in mammalian cells. Generally, the dose of viral vector vaccine, for therapeutic or prophylactic use, can be from about 1×10⁴ to about 1×10¹¹, advantageously from about 1×10⁷ to about 1×10¹⁰, or, preferably, from about 1×10⁷ to about 1×10⁹ plaque-forming units per kilogram. Preferably, viral vectors are administered parenterally, for example, in 3 doses that are 4 weeks apart. Those skilled in the art will recognize that it is preferable to avoid adding a chemical adjuvant to a composition containing a viral vector of the invention and thereby minimizing the immune response to the viral vector itself.

[0049] Non-toxicogenic Vibrio cholerae mutant strains that can be used in live oral vaccines are described by Mekalanos et al. (Nature 306:551, 1983) and in U.S. Pat. No. 4,882,278 (strain in which a substantial amount of the coding sequence of each of the two ctxA alleles has been deleted so that no functional cholerae toxin is produced); WO 92/11354 (strain in which the irgA locus is inactivated by mutation; this mutation can be combined in a single strain with ctxA mutations); and WO 94/1533 (deletion mutant lacking functional ctxA and attRS1 DNA sequences). These strains can be genetically engineered to express heterologous antigens, as described in WO 94/19482. An effective vaccine dose of a V. cholerae strain capable of expressing a polypeptide or polypeptide derivative encoded by a polynucleotide molecule of the invention can contain, e.g., about 1×10⁵ to about 1×10⁹, preferably about 1×10⁶ to about 1×10⁸ viable bacteria in an appropriate volume for the selected route of administration. Preferred routes of administration include all mucosal routes, but, most preferably, these vectors are administered intranasally or orally.

[0050] Attenuated Salmonella typhimurium strains, genetically engineered for recombinant expression of heterologous antigens, and their use as oral vaccines, are described by Nakayama et al. (Bio/Technology 6:693, 1988) and in WO 92/11361. Preferred routes of administration for these vectors include all mucosal routes. Most preferably, the vectors are administered intranasally or orally.

[0051] Others bacterial strains useful as vaccine vectors are described by High et al. (EMBO 11:1991, 1992) and Sizemore et al. (Science 270:299, 1995; Shigella flexneri); Medaglini et al. (Proc. Natl. Acad. Sci. U.S.A. 92:6868, 1995; (Streptococcus gordonii); Flynn (Cell. Mol. Biol. 40 (suppl. I):31, 1194), and in WO 88/6626, WO 90/0594, WO 91/13157, WO 92/1796, and WO 92/21376 (Bacille Calmette Guerin). In bacterial vectors, a polynucleotide of the invention can be inserted into the bacterial genome or it can remain in a free state, for example, carried on a plasmid.

[0052] An adjuvant can also be added to a composition containing a bacterial vector vaccine. A number of adjuvants that can be used are known to those skilled in the art. For example, preferred adjuvants can be selected from the list provided below.

[0053] According to a fourth aspect of the invention, there is also provided (i) a composition of matter containing a polynucleotide of the invention, together with a diluent or carrier; (ii) a pharmaceutical composition containing a therapeutically or prophylactically effective amount of a polynucleotide of the invention; (iii) a method for inducing an immune response against Helicobacter, in a mammal, by administering to the mammal an immunogenically effective amount of a polynucleotide of the invention to elicit an immune response, e.g., a protective immune response to Helicobacter; and (iv) a method for preventing and/or treating a Helicobacter (e.g., H. pylori, H. felis, H. mustelae, or H. heilmanii) infection, by administering a prophylactic or therapeutic amount of a polynucleotide of the invention to an individual in need of such treatment. Additionally, the fourth aspect of the invention encompasses the use of a polynucleotide of the invention in the preparation of a medicament for preventing and/or treating Helicobacter infection. The fourth aspect of the invention preferably includes the use of a polynucleotide molecule placed under conditions for expression in a mammalian cell, e.g., in a plasmid that is unable to replicate in mammalian cells and to substantially integrate into a mammalian genome.

[0054] Polynucleotides (for example, DNA or RNA molecules) of the invention can also be administered as such to a mammal as a vaccine. When a DNA molecule of the invention is used, it can be in the form of a plasmid that is unable to replicate in a mammalian cell and unable to integrate into the mammalian genome. Typically, a DNA molecule is placed under the control of a promoter suitable for expression in a mammalian cell. The promoter can function ubiquitously or tissue-specifically. Examples of non-tissue specific promoters include the early Cytomegalovirus (CMV) promoter (U.S. Pat. No. 4,168,062) and the Rous Sarcoma Virus promoter (Norton et al., Molec. Cell Biol. 5:281, 1985). The desmin promoter (Li et al., Gene 78:243, 1989; Li et al., J. Biol. Chem. 266:6562, 1991; Li et al., J. Biol. Chem. 268:10403, 1993) is tissue-specific and drives expression in muscle cells. More generally, useful promoters and vectors are described, e.g., in WO 94/21797 and by Hartikka et al. (Human Gene Therapy 7:1205, 1996).

[0055] For DNA/RNA vaccination, the polynucleotide of the invention can encode a precursor or a mature form of a polypeptide of the invention. When it encodes a precursor form, the precursor sequence can be homologous or heterologous. In the latter case, a eucaryotic leader sequence can be used, such as the leader sequence of the tissue-type plasminogen factor (tPA).

[0056] A composition of the invention can contain one or several polynucleotides of the invention. It can also contain at least one additional polynucleotide encoding another Helicobacter antigen, such as urease subunit A, B, or both, or a fragment, derivative, mutant, or analog thereof. A polynucleotide encoding a cytokine, such as interleukin-2 (IL-2) or interleukin-12 (IL-12), can also be added to the composition so that the immune response is enhanced. These additional polynucleotides are placed under appropriate control for expression. Advantageously, DNA molecules of the invention and/or additional DNA molecules to be included in the same composition are carried in the same plasmid.

[0057] Standard methods can be used in the preparation of therapeutic polynucleotides of the invention. For example, a polynucleotide can be used in a naked form, free of any delivery vehicles, such as anionic liposomes, cationic lipids, microparticles, e.g., gold microparticles, precipitating agents, e.g., calcium phosphate, or any other transfection-facilitating agent. In this case, the polynucleotide can be simply diluted in a physiologically acceptable solution, such as sterile saline or sterile buffered saline, with or without a carrier. When present, the carrier preferably is isotonic, hypotonic, or weakly hypertonic, and has a relatively low ionic strength, such as provided by a sucrose solution, e.g., a solution containing 20% sucrose.

[0058] Alternatively, a polynucleotide can be associated with agents that assist in cellular uptake. It can be, e.g., (i) complemented with a chemical agent that modifies cellular permeability, such as bupivacaine (see, e.g., WO 94/16737), (ii) encapsulated into liposomes, or (iii) associated with cationic lipids or silica, gold, or tungsten microparticles.

[0059] Anionic and neutral liposomes are well-known in the art (see, e.g., Liposomes: A Practical Approach, RPC New Ed, IRL Press, 1990, for a detailed description of methods for making liposomes) and are useful for delivering a large range of products, including polynucleotides.

[0060] Cationic lipids can also be used for gene delivery. Such lipids include, for example, Lipofectin™, which is also known as DOTMA (N-[1-(2,3-dioleyloxy)propyl]-N,N,N-trimethylammonium chloride), DOTAP (1,2-bis(oleyloxy)-3-(trimethylammonio)propane), DDAB (dimethyldioctadecylammonium bromide), DOGS (dioctadecylamidologlycyl spermine), and cholesterol derivatives. A description of these cationic lipids can be found in EP 187,702, WO 90/11092, U.S. Pat. No. 5,283,185, WO 91/15501, WO 95/26356, and U.S. Pat. No. 5,527,928. Cationic lipids for gene delivery are preferably used in association with a neutral lipid such as DOPE (dioleyl phosphatidylethanolamine; WO 90/11092). Other transfection-facilitating compounds can be added to a formulation containing cationic liposomes. A number of them are described in, e.g., WO 93/18759, WO 93/19768, WO 94/25608, and WO 95/2397. They include, e.g., spermine derivatives useful for facilitating the transport of DNA through the nuclear membrane (see, for example, WO 93/18759) and membrane-permeabilizing compounds such as GALA, Gramicidine S, and cationic bile salts (see, for example, WO 93/19768).

[0061] Gold or tungsten microparticles can also be used for gene delivery, as described in WO 91/359, WO 93/17706, and by Tang et al. (Nature 356:152, 1992). In this case, the microparticle-coated polynucleotides can be injected via intradermal or intraepidermal routes using a needleless injection device (“gene gun”), such as those described in U.S. Pat. Nos. 4,945,050, 5,015,580, and WO 94/24263.

[0062] The amount of DNA to be used in a vaccine recipient depends, e.g., on the strength of the promoter used in the DNA construct, the immunogenicity of the expressed gene product, the condition of the mammal intended for administration (e.g., the weight, age, and general health of the mammal), the mode of administration, and the type of formulation. In general, a therapeutically or prophylactically effective dose from about 1 μg to about 1 mg, preferably, from about 10 μg to about 800 μg, and, more preferably, from about 25 μg to about 250 μg, can be administered to human adults. The administration can be achieved in a single dose or repeated at intervals.

[0063] The route of administration can be any conventional route used in the vaccine field. As general guidance, a polynucleotide of the invention can be administered via a mucosal surface, e.g., an ocular, intranasal, pulmonary, oral, intestinal, rectal, vaginal, or urinary tract surface, or via a parenteral route, e.g., by an intravenous, subcutaneous, intraperitoneal, intradermal, intraepidermal, or intramuscular route. The choice of administration route will depend on, e.g., the formulation that is selected. A polynucleotide formulated in association with bupivacaine is advantageously administered into muscle. When a neutral or anionic liposome or a cationic lipid, such as DOTMA, is used, the formulation can be advantageously injected via intravenous, intranasal (for example, by aerosolization), intramuscular, intradermal, and subcutaneous routes. A polynucleotide in a naked form can advantageously be administered via the intramuscular, intradermal, or subcutaneous routes. Although not absolutely required, such a composition can also contain an adjuvant. A systemic adjuvant that does not require concomitant administration in order to exhibit an adjuvant effect is preferable.

[0064] The sequence information provided in the present application enables the design of specific nucleotide probes and primers that can be used in diagnostic methods. Accordingly, in a fifth aspect of the invention, there is provided a nucleotide probe or primer having a sequence found in, or derived by degeneracy of the genetic code from, a sequence shown in the sequence listing (odd numbers, up to SEQ ID NO:363).

[0065] The term “probe” as used in the present application refers to DNA (preferably single stranded) or RNA molecules (or modifications or combinations thereof) that hybridize under the stringent conditions, as defined above, to polynucleotide molecules having sequences homologous to any of those shown in the sequence listing (odd numbers, up to SEQ ID NO:363), or to a complementary or anti-sense sequence of any of those shown in the sequence listing (odd numbers, up to SEQ ID NO:363). Generally, probes are significantly shorter than the full-length sequences shown in the sequence listing. For example, they can contain from about 5 to about 100, preferably from about 10 to about 80 nucleotides. In particular, probes have sequences that are at least 75%, preferably at least 85%, more preferably 95% homologous to a portion of a sequence as shown in the sequence listing (odd numbers, up to SEQ ID NO:363), or a sequence complementary to any of such sequences.

[0066] Probes can contain modified bases, such as inosine, methyl-5-deoxycytidine, deoxyuridine, dimethylamino-5-deoxyuridine, or diamino-2, 6-purine. Sugar or phosphate residues can also be modified or substituted. For example, a deoxyribose residue can be replaced by a polyamide (Nielsen et al., Science 254:1497, 1991) and phosphate residues can be replaced by ester groups such as diphosphate, alkyl, arylphosphonate, and phosphorothioate esters. In addition, the 2′-hydroxyl group on ribonucleotides can be modified by addition of, e.g., alkyl groups.

[0067] Probes of the invention can be used in diagnostic tests, or as capture or detection probes. Such capture probes can be immobilized on solid supports, directly or indirectly, by covalent means or by passive adsorption. A detection probe can be labeled by a detectable label, for example a label selected from radioactive isotopes; enzymes, such as peroxidase and alkaline phosphatase; enzymes that are able to hydrolyze a chromogenic, fluorogenic, or luminescent substrate; compounds that are chromogenic, fluorogenic, or luminescent; nucleotide base analogs; and biotin.

[0068] Probes of the invention can be used in any conventional hybridization method, such as in dot blot methods (Maniatis et al., Molecular Cloning: A Laboratory Manual, Cold Spring Harbor Laboratory Press, Cold Spring Harbor, N.Y., 1982), Southern blot methods (Southern, J. Mol. Biol. 98:503, 1975), northern blot methods (identical to Southern blot to the exception that RNA is used as a target), or a sandwich method (Dunn et al., Cell 12:23, 1977). As is known in the art, the latter technique involves the use of a specific capture probe and a specific detection probe that have nucleotide sequences that are at least partially different from each other.

[0069] Primers used in the invention usually contain about 10 to 40 nucleotides and are used to initiate enzymatic polymerization of DNA in an amplification process (e.g., PCR), an elongation process, or a reverse transcription method. In a diagnostic method involving PCR, the primers can be labeled.

[0070] Thus, the invention also encompasses (i) a reagent containing a probe of the invention for detecting and/or identifying the presence of Helicobacter in a biological material; (ii) a method for detecting and/or identifying the presence of Helicobacter in a biological material, in which (a) a sample is recovered or derived from the biological material, (b) DNA or RNA is extracted from the material and denatured, and (c) the sample is exposed to a probe of the invention, for example, a capture probe, a detection probe, or both, under stringent hybridization conditions, so that hybridization is detected; and (iii) a method for detecting and/or identifying the presence of Helicobacter in a biological material, in which (a) a sample is recovered or derived from the biological material, (b) DNA is extracted therefrom, (c) the extracted DNA is contacted with at least one, or, preferably two, primers of the invention, and amplified by the polymerase chain reaction, and (d) an amplified DNA molecule is produced.

[0071] As mentioned above, polypeptides that can be produced by expression of the polynucleotides of the invention can be used as vaccine antigens. Accordingly, a sixth aspect of the invention features a substantially purified polypeptide or polypeptide derivative having an amino acid sequence encoded by a polynucleotide of the invention.

[0072] A “substantially purified polypeptide” is defined as a polypeptide that is separated from the environment in which it naturally occurs and/or a polypeptide that is free of most of the other polypeptides that are present in the environment in which it was synthesized. The polypeptides of the invention can be purified from a natural source, such as a Helicobacter strain, or can be produced using recombinant methods.

[0073] Homologous polypeptides or polypeptide derivatives encoded by polynucleotides of the invention can be screened for specific antigenicity by testing cross-reactivity with an antiserum raised against a polypeptide having an amino acid sequence as shown in the sequence listing (even numbers, up to SEQ ID NO:364). Briefly, a monospecific hyperimmune antiserum can be raised against a purified reference polypeptide as such or as a fusion polypeptide, for example, an expression product of MBP, GST, or His-tag systems, or a synthetic peptide predicted to be antigenic. The homologous polypeptide or derivative that is screened for specific antigenicity can be produced as such or as a fusion polypeptide. In the latter case, and if the antiserum is also raised against a fusion polypeptide, two different fusion systems are employed. Specific antigenicity can be determined using a number of methods, including Western blot (Towbin et al., Proc. Natl. Acad. Sci. U.S.A. 76:4350, 1979), dot blot, and ELISA methods, as described below.

[0074] In a Western blot assay, the product to be screened, either as a purified preparation or a total E. coli extract, is fractionated by SDS-PAGE, as described, for example, by Laemmli (Nature 227:680, 1970). After being transferred to a filter, such as a nitrocellulose membrane, the material is incubated with the monospecific hyperimmune antiserum, which is diluted in a range of dilutions from about 1:50 to about 1:5000, preferably from about 1:100 to about 1:500. Specific antigenicity is shown once a band corresponding to the product exhibits reactivity at any of the dilutions in the range.

[0075] In an ELISA assay, the product to be screened can be used as the coating antigen. A purified preparation is preferred, but a whole cell extract can also be used.

[0076] Briefly, about 100 μL of a preparation of about 10 μg protein/ml is distributed into wells of a 96-well ELISA plate. The plate is incubated for about 2 hours at 37° C., then overnight at 4° C. The plate is washed with phosphate buffer saline (PBS) containing 0.05% Tween 20 (PBS/Tween buffer) and the wells are saturated with 250 μL PBS containing 1% bovine serum albumin (BSA), to prevent non-specific antibody binding. After 1 hour of incubation at 37° C., the plate is washed with PBS/Tween buffer. The antiserum is serially diluted in PBS/Tween buffer containing 0.5% BSA, and 100 μL dilutions are added to each well. The plate is incubated for 90 minutes at 37° C., washed, and evaluated using standard methods. For example, a goat anti-rabbit peroxidase conjugate can be added to the wells when the specific antibodies used were raised in rabbits. Incubation is carried out for about 90 minutes at 37° C. and the plate is washed.

[0077] The reaction is developed with the appropriate substrate and the reaction is measured by colorimetry (absorbance measured spectrophotometrically). Under these experimental conditions, a positive reaction is shown once an O.D. value of 1.0 is detected with a dilution of at least about 1:50, preferably of at least about 1:500.

[0078] In a dot blot assay, a purified product is preferred, although a whole cell extract can be used. Briefly, a solution of the product at a concentration of about 100 μg/ml is serially diluted two-fold with 50 mM Tris-HCl (pH 7.5). One hundred μL of each dilution is applied to a filter, such as a 0.45 μm nitrocellulose membrane, set in a 96-well dot blot apparatus (Biorad). The buffer is removed by applying vacuum to the system. Wells are washed by addition of 50 mM Tris-HCl (pH 7.5) and the membrane is air-dried. The membrane is saturated in blocking buffer (50 mM Tris-HCl (pH 7.5), 0.15 M NaCl, 10 g/L skim milk) and incubated with an antiserum diluted from about 1:50 to about 1:5000, preferably about 1:500. The reaction is detected using standard methods. For example, a goat anti-rabbit peroxidase conjugate can be added to the wells when rabbit antibodies are used. Incubation is carried out for about 90 minutes at 37° C. and the blot is washed. The reaction is developed with the appropriate substrate and stopped. The reaction is then measured visually by the appearance of a colored spot, e.g., by colorimetry. Under these experimental conditions, a positive reaction is associated with detection of a colored spot for reactions carried out with a dilution of at least about 1:50, preferably, of at least about 1:500. Therapeutic or prophylactic efficacy of a polypeptide or polypeptide derivative of the invention can be evaluated as described below.

[0079] According to a seventh aspect of the invention, there is provided (i) a composition of matter containing a polypeptide of the invention together with a diluent or carrier; (ii) a pharmaceutical composition containing a therapeutically or prophylactically effective amount of a polypeptide of the invention; (iii) a method for inducing an immune response against Helicobacter in a mammal by administering to the mammal an immunogenically effective amount of a polypeptide of the invention to elicit an immune response, e.g., a protective immune response to Helicobacter; and (iv) a method for preventing and/or treating a Helicobacter (e.g., H. pylori, H. felis, H. mustelae, or H. heilmanii) infection, by administering a prophylactic or therapeutic amount of a polypeptide of the invention to an individual in need of such treatment. Additionally, this aspect of the invention includes the use of a polypeptide of the invention in the preparation of a medicament for preventing and/or treating Helicobacter infection.

[0080] The immunogenic compositions of the invention can be administered by any conventional route in use in the vaccine field, for example, to a mucosal (e.g., ocular, intranasal, pulmonary, oral, gastric, intestinal, rectal, vaginal, or urinary tract) surface or via a parenteral (e.g., subcutaneous, intradermal, intramuscular, intravenous, or intraperitoneal) route. The choice of the administration route depends upon a number of parameters, such as the adjuvant used. For example, if a mucosal adjuvant is used, the intranasal or oral route will be preferred, and if a lipid formulation or an aluminum compound is used, a parenteral route will be preferred. In the latter case, the subcutaneous or intramuscular route is most preferred. The choice of administration route can also depend upon the nature of the vaccine agent. For example, a polypeptide of the invention fused to CTB or to LTB will be best administered to a mucosal surface.

[0081] A composition of the invention can contain one or several polypeptides or derivatives of the invention. It can also contain at least one additional Helicobacter antigen, such as the urease apoenzyme, or a subunit, fragment, homolog, mutant, or derivative thereof.

[0082] For use in a composition of the invention, a polypeptide or polypeptide derivative can be formulated into or with liposomes, such as neutral or anionic liposomes, microspheres, ISCOMS, or virus-like particles (VLPs), to facilitate delivery and/or enhance the immune response. These compounds are readily available to those skilled in the art; for example, see Liposomes: A Practical Approach (supra). Adjuvants other than liposomes can also be used in the invention and are well known in the art (see, for example, the list provided below).

[0083] Administration can be achieved in a single dose or repeated as necessary at intervals that can be determined by one skilled in the art. For example, a priming dose can be followed by three booster doses at weekly or monthly intervals. An appropriate dose depends on various parameters, including the nature of the recipient (e.g., whether the recipient is an adult or an infant), the particular vaccine antigen, the route and frequency of administration, the presence/absence or type of adjuvant, and the desired effect (e.g., protection and/or treatment), and can be readily determined by one skilled in the art. In general, a vaccine antigen of the invention can be administered mucosally in an amount ranging from about 10 μg to about 500 mg, preferably from about 1 mg to about 200 mg. For a parenteral route of administration, the dose usually should not exceed about 1 mg, and is, preferably, about 100 μg.

[0084] When used as components of a vaccine, the polynucleotides and polypeptides of the invention can be used sequentially as part of a multi-step immunization process. For example, a mammal can be initially primed with a vaccine vector of the invention, such as a pox virus, e.g., via a parenteral route, and then boosted twice with a polypeptide encoded by the vaccine vector, e.g., via the mucosal route. In another example, liposomes associated with a polypeptide or polypeptide derivative of the invention can be used for priming, with boosting being carried out mucosally using a soluble polypeptide or polypeptide derivative of the invention, in combination with a mucosal adjuvant (e.g., LT).

[0085] Polypeptides and polypeptide derivatives of the invention can also be used as diagnostic reagents for detecting the presence of anti-Helicobacter antibodies, e.g., in blood samples. Such polypeptides can be about 5 to about 80, preferably, about 10 to about 50 amino acids in length and can be labeled or unlabeled, depending upon the diagnostic method. Diagnostic methods involving such a reagent are described below.

[0086] Upon expression of a polynucleotide molecule of the invention, a polypeptide or polypeptide derivative is produced and can be purified using known methods. For example, the polypeptide or polypeptide derivative can be produced as a fusion protein containing a fused tail that facilitates purification. The fusion product can be used to immunize a small mammal, e.g., a mouse or a rabbit, in order to raise monospecific antibodies against the polypeptide or polypeptide derivative. The eighth aspect of the invention thus provides a monospecific antibody that binds to a polypeptide or polypeptide derivative of the invention.

[0087] By “monospecific antibody” is meant an antibody that is capable of reacting with a unique, naturally-occurring Helicobacter polypeptide. An antibody of the invention can be polyclonal or monoclonal. Monospecific antibodies can be recombinant, e.g., chimeric (e.g., consisting of a variable region of murine origin and a human constant region), humanized (e.g., a human immunoglobulin constant region and a variable region of animal, e.g., murine, origin), and/or single chain. Both polyclonal and monospecific antibodies can also be in the form of immunoglobulin fragments, e.g., F(ab)′2 or Fab fragments. The antibodies of the invention can be of any isotype, e.g., IgG or IgA, and polyclonal antibodies can be of a single isotype or can contain a mixture of isotypes.

[0088] The antibodies of the invention, which can be raised to a polypeptide or polypeptide derivative of the invention, can be produced and identified using standard immunological assays, e.g., Western blot assays, dot blot assays, or ELISA (see, e.g., Coligan et al., Current Protocols in Immunology, John Wiley & Sons, Inc., New York, N.Y., 1994). The antibodies can be used in diagnostic methods to detect the presence of Helicobacter antigens in a sample, such as a biological sample. The antibodies can also be used in affinity chromatography methods for purifying a polypeptide or polypeptide derivative of the invention. As is discussed further below, the antibodies can also be used in prophylactic and therapeutic passive immunization methods.

[0089] Accordingly, a ninth aspect of the invention provides (i) a reagent for detecting the presence of Helicobacter in a biological sample that contains an antibody, polypeptide, or polypeptide derivative of the invention; and (ii) a diagnostic method for detecting the presence of Helicobacter in a biological sample, by contacting the biological sample with an antibody, a polypeptide, or a polypeptide derivative of the invention, so that an immune complex is formed, and detecting the complex as an indication of the presence of Helicobacter in the sample or the organism from which the sample was derived. The immune complex is formed between a component of the sample and the antibody, polypeptide, or polypeptide derivative, and that any unbound material can be removed prior to detecting the complex. A polypeptide reagent can be used for detecting the presence of anti-Helicobacter antibodies in a sample, e.g., a blood sample, while an antibody of the invention can be used for screening a sample, such as a gastric extract or biopsy sample, for the presence of Helicobacter polypeptides.

[0090] For use in diagnostic methods, the reagent (e.g., the antibody, polypeptide, or polypeptide derivative of the invention) can be in a free state or can be immobilized on a solid support, such as, for example, on the interior surface of a tube or on the surface, or within pores, of a bead. Immobilization can be achieved using direct or indirect means. Direct means include passive adsorption (i.e., non-covalent binding) or covalent binding between the support and the reagent. By “indirect means” is meant that an anti-reagent compound that interacts with the reagent is first attached to the solid support. For example, if a polypeptide reagent is used, an antibody that binds to it can serve as an anti-reagent, provided that it binds to an epitope that is not involved in recognition of antibodies in biological samples. Indirect means can also employ a ligand-receptor system, for example, a molecule, such as a vitamin, can be grafted onto the polypeptide reagent and the corresponding receptor can be immobilized on the solid phase. This concept is illustrated by the well known biotin-streptavidin system. Alternatively, indirect means can be used, e.g., by adding to the reagent a peptide tail, chemically or by genetic engineering, and immobilizing the grafted or fused product by passive adsorption or covalent linkage of the peptide tail.

[0091] According to a tenth aspect of the invention, there is provided a process for purifying, from a biological sample, a polypeptide or polypeptide derivative of the invention, which involves carrying out antibody-based affinity chromatography with the biological sample, wherein the antibody is a monospecific antibody of the invention.

[0092] For use in a purification process of the invention, the antibody can be polyclonal or monospecific, and preferably is of the IgG type. Purified IgGs can be prepared from an antiserum using standard methods (see, e.g., Coligan et al., supra). Conventional chromatography supports, as well as standard methods for grafting antibodies, are described, for example, by Harlow et al. (Antibodies: A Laboratory Manual, Cold Spring Harbor Laboratory Press, Cold Spring Harbor, N.Y., 1988).

[0093] Briefly, a biological sample, such as an H. pylori extract, preferably in a buffer solution, is applied to a chromatography material, which is, preferably, equilibrated with the buffer used to dilute the biological sample, so that the polypeptide or polypeptide derivative of the invention (i.e., the antigen) is allowed to adsorb onto the material. The chromatography material, such as a gel or a resin coupled to an antibody of the invention, can be in batch form or in a column. The unbound components are washed off and the antigen is eluted with an appropriate elution buffer, such as a glycine buffer, a buffer containing a chaotropic agent, e.g., guanidine HCl, or a buffer having high salt concentration (e.g., 3 M MgCl₂). Eluted fractions are recovered and the presence of the antigen is detected, e.g., by measuring the absorbance at 280 nm.

[0094] An antibody of the invention can be screened for therapeutic efficacy as follows. According to an eleventh aspect of the invention, there is provided (i) a composition of matter containing a monospecific antibody of the invention, together with a diluent or carrier; (ii) a pharmaceutical composition containing a therapeutically or prophylactically effective amount of a monospecific antibody of the invention, and (iii) a method for treating or preventing Helicobacter (e.g., H. pylori, H. felis, H. mustelae, or H. heilmanii) infection, by administering a therapeutic or prophylactic amount of a monospecific antibody of the invention to an individual in need of such treatment. In addition, the eleventh aspect of the invention includes the use of a monospecific antibody of the invention in the preparation of a medicament for treating or preventing Helicobacter infection.

[0095] The monospecific antibody can be polyclonal or monoclonal, and is, preferably, predominantly of the IgA isotype. In passive immunization methods, the antibody is administered to a mucosal surface of a mammal, e.g., the gastric mucosa, e.g., orally or intragastrically, optionally, in the presence of a bicarbonate buffer. Alternatively, systemic administration, not requiring a bicarbonate buffer, can be carried out. A monospecific antibody of the invention can be administered as a single active agent or as a mixture with at least one additional monospecific antibody specific for a different Helicobacter polypeptide. The amount of antibody and the particular regimen used can be readily determined by one skilled in the art. For example, daily administration of about 100 to 1,000 mg of antibody over one week, or three doses per day of about 100 to 1,000 mg of antibody over two or three days, can be effective regimens for most purposes.

[0096] Therapeutic or prophylactic efficacy can be evaluated using standard methods in the art, e.g., by measuring induction of a mucosal immune response or induction of protective and/or therapeutic immunity, using, e.g., the H. felis mouse model and the procedures described by Lee et al. (Eur. J. Gastroenterology & Hepatology 7:303, 1995) or Lee et al. (J. Infect. Dis. 172:161, 1995). Those skilled in the art will recognize that the H. felis strain of the model can be replaced with another Helicobacter strain. For example, the efficacy of polynucleotide molecules and polypeptides from H. pylori is, preferably, evaluated in a mouse model using an H. pylori strain. Protection can be determined by comparing the degree of Helicobacter infection in the gastric tissue assessed by, for example, urease activity, bacterial counts, or gastritis, to that of a control group. Protection is shown when infection is reduced by comparison to the control group. Such an evaluation can be made for polynucleotides, vaccine vectors, polypeptides, and polypeptide derivatives, as well as for antibodies of the invention.

[0097] For example, various doses of an antibody of the invention can be administered to the gastric mucosa of mice previously challenged with an H. pylori strain, as described, e.g., by Lee et al. (supra). Then, after an appropriate period of time, the bacterial load of the mucosa can be estimated by assessing urease activity, as compared to a control. Reduced urease activity indicates that the antibody is therapeutically effective.

[0098] Adjuvants that can be used in any of the vaccine compositions described above are described as follows. Adjuvants for parenteral administration include, for example, aluminum compounds, such as aluminum hydroxide, aluminum phosphate, and aluminum hydroxy phosphate. The antigen can be precipitated with, or adsorbed onto, the aluminum compound using standard methods. Other adjuvants, such as RIBI (ImmunoChem, Hamilton, Mont.), can also be used in parenteral administration.

[0099] Adjuvants that can be used for mucosal administration include, for example, bacterial toxins, e.g., the cholera toxin (CT), the E. coli heat-labile toxin (LT), the Clostridium difficile toxin A, the pertussis toxin (PT), and combinations, subunits, toxoids, or mutants thereof. For example, a purified preparation of native cholera toxin subunit B (CTB) can be used. Fragments, homologs, derivatives, and fusions to any of these toxins can also be used, provided that they retain adjuvant activity. Preferably, a mutant having reduced toxicity is used. Suitable mutants are described, e.g., in WO 95/17211 (Arg-7-Lys CT mutant), WO 96/6627 (Arg-192-Gly LT mutant), and WO 95/34323 (Arg-9-Lys and Glu-129-Gly PT mutant). Additional LT mutants that can be used in the methods and compositions of the invention include, e.g., Ser-63-Lys, Ala-69-Gly, Glu-110-Asp, and Glu-112-Asp mutants. Other adjuvants, such as the bacterial monophosphoryl lipid A (MPLA) of, e.g., E. coli, Salmonella Minnesota, Salmonella typhimurium, or Shigella flexneri; saponins, and polylactide glycolide (PLGA) microspheres, can also be used in mucosal administration. Adjuvants useful for both mucosal and parenteral administrations, such as polyphosphazene (WO 95/2415), can also be used.

[0100] Any pharmaceutical composition of the invention, containing a polynucleotide, polypeptide, polypeptide derivative, or antibody of the invention, can be manufactured using standard methods. It can be formulated with a pharmaceutically acceptable diluent or carrier, e.g., water or a saline solution, such as phosphate buffer saline, optionally, including a bicarbonate salt, such as sodium bicarbonate, e.g., 0.1 to 0.5 M. Bicarbonate can advantageously be added to compositions intended for oral or intragastric administration. In general, a diluent or carrier can be selected on the basis of the mode and route of administration, and standard pharmaceutical practice. Suitable pharmaceutical carriers and diluents, as well as pharmaceutical necessities for their use in pharmaceutical formulations, are described in Remington's Pharmaceutical Sciences, a standard reference text in this field and in the USP/NF.

[0101] The invention also includes methods in which gastroduodenal infections, such as Helicobacter infection, are treated by oral administration of a Helicobacter polypeptide of the invention and a mucosal adjuvant, in combination with an antibiotic, an antisecretory agent, a bismuth salt, an antacid, sucralfate, or a combination thereof. Examples of such compounds that can be administered with the vaccine antigen and an adjuvant are antibiotics, including, e.g., macrolides, tetracyclines, β-lactams, aminoglycosides, quinolones, penicillins, and derivatives thereof (specific examples of antibiotics that can be used in the invention include, e.g., amoxicillin, clarithromycin, tetracycline, metronidizole, erythromycin, cefuroxime, and erythromycin); antisecretory agents, including, e.g., H₂-receptor antagonists (e.g., cimetidine, ranitidine, famotidine, nizatidine, and roxatidine), proton pump inhibitors (e.g., omeprazole, lansoprazole, and pantoprazole), prostaglandin analogs (e.g., misoprostil and enprostil), and anticholinergic agents (e.g., pirenzepine, telenzepine, carbenoxolone, and proglumide); and bismuth salts, including colloidal bismuth subcitrate, tripotassium dicitrate bismuthate, bismuth subsalicylate, bicitropeptide, and pepto-bismol (see, e.g., Goodwin et al., Helicobacter pylori, Biology and Clinical Practice, CRC Press, Boca Raton, Fla., pp 366-395, 1993; Physicians' Desk Reference, 49^{th} edn., Medical Economics Data Production Company, Montvale, N.J., 1995). In addition, compounds containing more than one of the above-listed components coupled together, e.g., ranitidine coupled to bismuth subcitrate, can be used. The invention also includes compositions for carrying out these methods, i.e., compositions containing a Helicobacter antigen (or antigens) of the invention, an adjuvant, and one or more of the above-listed compounds, in a pharmaceutically acceptable carrier or diluent.

[0102] Amounts of the above-listed compounds used in the methods and compositions of the invention can readily be determined by one skilled in the art. In addition, one skilled in the art can readily design treatment/immunization schedules. For example, the non-vaccine components can be administered on days 1-14, and the vaccine antigen+adjuvant can be administered on days 7, 14, 21, and 28.

[0103] Methods and pharmaceutical compositions of the invention can be used to treat or to prevent Helicobacter infections and, accordingly, gastroduodenal diseases associated with these infections, including acute, chronic, and atrophic gastritis, and peptic ulcer diseases, e.g., gastric and duodenal ulcers.

[0104] The invention is further illustrated by the following examples. Example 1 describes identification of genes, such as genes that encode the polypeptides of the invention, in the Helicobacter genome, as well as identification of signal sequences, and primer design for amplification of genes lacking signal sequences. Example 2 describes cloning of DNA molecules encoding polypeptides of the invention into a vector that provides a histidine tag, and production and purification of the resulting his-tagged fusion proteins. Example 3 describes methods for cloning DNA encoding the polypeptides of the invention so that they can be produced without his-tags, and Example 4 describes methods for purifying recombinantly produced polypeptides of the invention.

### EXAMPLE 1

### Identification of Genes in the H. pylori Genome, Identification of Signal Sequences, and Primer Design for Amplification of Genes Lacking Signal Sequences

[0105] 1.A. Creating H. pylori genomic databases

[0106] The H. pylori genome was provided as a text file containing a single contiguous string of nucleotides that had been determined to be 1.76 Megabases in length. The complete genome was split into 17 separate files using the program SPLIT (Creativity in Action), giving rise to 16 contigs, each containing 100,000 nucleotides, and a 17^{th} contig containing the remaining 76,000 nucleotides. A header was added to each of the 17 files using the format: >hpgo.txt (representing contig 1), .hpg1.txt (representing contig 2), etc. The resulting 17 files, named hpg0 through hpg16, were then copied together to form one file that represented the plus strand of the complete H. pylori genome. The constructed database was given the designation “H.” A negative strand database of the H. pylori genome was created similarly by first creating a reverse complement of the positive strand using the program SeqPup (D. G. Gilbert, Indiana University Biology Department) and then performing the same procedure as described above for the plus strand. This database was given the designation “N.”

[0107] The regions predicted to encode open reading frames (ORFs) were defined for the complete H. pylori genome using the program GENEMARK™ (Borodovsky et al., Comp. Chem. 17:123, 1993). A database was created from a text file containing an annotated version of all ORFs predicted to be encoded by the H. pylori genome for both the plus and minus strands, and was given the designation “O.” Each ORF was assigned a number indicating its location on the genome and its position relative to other genes. No manipulation of the text file was required.

[0108] 1.B. Searching the H. pylori Databases

[0109] The databases constructed as is described above were searched using the program FASTA (Pearson et al., Proc. Natl. Acad. Sci. U.S.A. 85:2444-2448, 1988). FASTA was used for searching either a DNA sequence against either of the gene databases (“H” and/or “N”), or a peptide sequence against the ORF library (“O”). TFASTX was used to search a peptide sequence against all possible reading frames of a DNA database (“H” and/or “N” libraries). Potential frameshifts also being resolved, FASTX was used for searching the translated reading frames of a DNA sequence against either a DNA database, or a peptide sequence against the protein database.

[0110] 1.C. Isolation of DNA Sequences from the H. pylori Genome

[0111] The FASTA searches against the constructed DNA databases identified exact nucleotide coordinates on one or more of the isolated contigs, and therefore the location of the target DNA. Once the exact location of the target sequence was known, the contig identified to carry the gene was exported into the software package MapDraw (DNAStar, Inc.) and the gene was isolated. Gene sequences with flanking DNA was then excised and copied into the EditSeq. Software package (DNAStar, Inc.) for further analysis.

[0112] 1.D. Identification of Signal Sequences

[0113] The deduced protein encoded by a target gene sequence is analyzed using the PROTEAN software package (DNAStar, Inc.). This analysis predicts those areas of the protein that are hydrophobic by using the Kyte-Doolittle algorithm, and identifies any potential polar residues preceding the hydrophobic core region, which is typical for many signal sequences. For confirmation, the target protein is then searched against a PROSITE database (DNAStar, Inc.) consisting of motifs and signatures. Characteristic of many signal sequences and hydrophobic regions in general, is the identification of predicted prokaryotic lipid attachment sites. Where confirmation between the two approaches is apparent at the N-terminus of any protein, putative cleavage sites are sought. Specifically, this includes the presence of either an Alanine (A), Serine (S), or Glycine (G) residue immediately after the core hydrophobic region. In the case of lipoproteins, a Cysteine (C) residue would be identified as the +1 residue, post-cleavage.

[0114] 1.E. Rational Design of PCR Primers Based on the Identification of Signal Sequences

[0115] In order to clone gene sequences as N-terminus translational fusions for the generation of recombinant proteins with N-terminal Histidine tags, the gene sequence that specifies the signal sequence is omitted. The 5′-end of the gene-specific portion of the N-terminal primer is designed to start at the first codon beyond the cleavage site. In the case of lipoproteins, the 5′- end of the N-terminal primer begins at the second codon, immediately after the modifiable residue at position +1 post-cleavage. The omission of the signal sequence from the recombinant allows for one-step purification, and potential problems associated with insertion of signal sequences in the membrane of the host strain carrying the hybrid construct are avoided.

### EXAMPLE 2

### Preparation of Isolated DNA Encoding GHPO 296 and GHPO 840, and Production of These Polypeptides as Histidine-tagged Fusion Proteins

[0116] 2.A. Preparation of Genomic DNA from Helicobacter pylori

[0117] H. pylori strain ORV2001, stored in LB medium containing 50% glycerol at −70° C., is grown on Colombia agar containing 7% sheep blood for 48 hours under microaerophilic conditions (8-10% CO₂, 5-7% O₂, 85-87% N₂). Cells are harvested washed with phosphate buffer saline (PBS) (pH 7.2), and DNA is then extracted from the cells using the Rapid Prep Genomic DNA Isolation kit (Pharmacia Biotech).

[0118] 2.B. PCR Amplification

[0119] DNA molecules encoding the polypeptides of the invention are amplified from genomic DNA, as can be prepared as is described above, by the Polymerase Chain Reaction (PCR) using primers that can readily be designed by one skilled in the art. For example, to amplify genes encoding GHPO 296 and GHPO 840, the following primers can be used:

[0120] GHPO 296: 5′-CCGAATTCGGTTATAAAGCCCCT-3′ (SEQ ID NO:365), and

[0121] 5′-CCGCTCGAGTTAAGGCTGATTTAA-3′ (SEQ ID NO:366).

[0122] GHPO 840: 5′-CGCGGATCCGAGGAAATAGCATGTTAATAACC-3′ (SEQ ID NO:367), and

[0123] 5′-CCGCTCGAGTCACTGCTTGCATGACTTATTCCA-3′ (SEQ ID NO:368).

[0124] The N-terminal and C-terminal primers for each clone both include a 5′ clamp and a restriction enzyme recognition sequence for cloning purposes (BamHI (GGATCC) and XhoI (CTCGAG) recognition sequences).

[0125] Amplification of gene-specific DNA is carried out using Vent DNA Polymerase (New England Biolabs) or Taq DNA polymerase (Appligene), according to the manufacturer's instructions. The reaction mixture, which is brought to a final volume of 100 μl with distilled water, is as follows:

| | | |
|---|---|---|
| dNTPs mix | 200 | μM |
| 10x ThermoPol buffer | 10 | μl |
| primers | 300 | nM each |
| DNA template | 50 | ng |
| Heat-stable DNA polymerase | 2 | units |

[0126] Appropriate amplification reaction conditions can readily be determined by one skilled in the art. For example, the following conditions can be used for amplification of DNA encoding GHPO 840 using the primers set forth above: 25 cycles of denaturation at 97° C. for 30 seconds, hybridization at 55° C. for 1 minute, and elongation at 72° C. for 2 minutes using Vent DNA polymerase.

[0127] 2.C. Transformation and Selection of Transformants

[0128] A single PCR product is thus amplified and then is digested at 37° C. for 2 hours with BamHI and XhoI together in a 20 μL reaction volume. The digested product is ligated to similarly cleaved pET28a (Novagen) that is dephosphorylated prior to the ligation by treatment with Calf Intestinal Alkaline Phosphatase (CIP). The gene fusion constructed in this manner allows one-step affinity purification of the resulting fusion protein because of the presence of histidine residues at the N-terminus of the fusion protein, which are encoded by the vector.

[0129] The ligation reaction (20 μL) is carried out at 14° C. overnight and then is used to transform 100 μl fresh E. coli XL1-blue competent cells (Novagen). The cells are incubated on ice for 2 hours, heat-shocked at 42° C. for 30 seconds, and returned to ice for 90 seconds. The samples are then added to 1 ml LB broth in the absence of selection and grown at 37° C. for 2 hours. The cells are plated out on LB agar containing kanamycin (50 μg/ml) at a 10× and neat dilution and incubated overnight at 37° C. The following day, 50 colonies are picked, plated onto secondary plates, and incubated at 37° C. overnight.

[0130] Five colonies are picked, grown in 3 ml LB broth supplemented with kanamycin (100 μg/ml), and grown overnight at 37° C. Plasmid DNA is extracted using the Quiagen mini-prep method and is quantitated by agarose gel electrophoresis.

[0131] PCR is performed with the gene-specific primers under the conditions set forth above and transformant DNA is confirmed to contain the desired insert. If PCR-positive, one of the five plasmid DNA samples (500 ng) extracted from the E. coli XL1-blue cells is used to transform competent BL21 (λDE3) E. coli competent cells (Novagen; as described previously). Transformants (10) are picked, plated onto selective kanamycin (50 μg/ml)-containing LB agar plates, and stored as a research stock in LB containing 50% glycerol.

[0132] 2.D. Purification of Recombinant Proteins

[0133] One ml of frozen glycerol stock prepared as described in 2.C. is used to inoculate 50 ml of LB medium containing 25 μg/ml kanamycin in a 250 ml Erlenmeyer flask. The flask is incubated at 37° C. for 2 hours or until the absorbance at 600 nm (OD₆₀₀) reaches 0.4-1.0. The culture is stopped from growing by placing the flask at 4° C. overnight. The following day, 10 ml of the overnight culture is used to inoculate 240 ml LB medium containing kanamycin (25 μg/ml), with the initial OD₆₀₀ being about 0.02-0.04. Four flasks are inoculated for each ORF. The cells are grown to an OD₆₀₀ of 1.0 (about 2 hours at 37° C.), a 1 ml sample is harvested by centrifugation, and the sample is analyzed by SDS-PAGE to detect any leaky expression. The remaining culture is induced with 1 mM IPTG and the induced cultures are grown for an additional 2 hours at 37° C.

[0134] The final OD₆₀₀ reading is taken and the cells are harvested by centrifugation at 5,000×g for 15 minutes at 4° C. The supernatant is discarded and the pellets are resuspended in 50 mM Tris-HCI (pH 8.0), 2 mM EDTA. Two hundred and fifty ml of buffer are used for each 1 L of culture and the cells are recovered by centrifugation at 12,000×g for 20 minutes. The supernatant is discarded and the pellets are stored at −45° C.

[0135] 2.E. Protein Purification

[0136] Pellets obtained using the methods described in 2.D. are thawed and resuspended in 95 ml of 50 mM Tris-HCl (pH 8.0). Pefabloc and lysozyme are added to final concentrations of 100 μM and 100 μg/ml, respectively. The mixture is homogenized with magnetic stirring at 5° C. for 30 minutes. Benzonase (Merck) is added to a final concentration of 1 U/ml, in the presence of 10 mM MgCl₂, to ensure total digestion of the DNA. The suspension is sonicated (Branson Sonifier 450) for 3 cycles of 2 minutes each at maximum output. The homogenate is centrifuged at 19,000×g for 15 minutes and both the supernatant and the pellet are analyzed by SDS-PAGE to detect the cellular location of the target protein in the soluble or insoluble fractions, as is described further below.

[0137] 2.E.1. Soluble Fraction

[0138] If the target protein is produced in a soluble form (i.e., in the supernatant obtained using the methods described in 2.E.) NaCl and imidazole are added to the supernatant to final concentrations of 50 mM Tris-HCl (pH 8.0), 0.5 M NaCl, and 10 mM imidazole (buffer A). The mixture is filtered through a 0.45 μtm membrane and loaded onto an IMAC column (Pharmacia HiTrap chelating Sepharose; 1 ml), which has been charged with nickel ions according to the manufacturer's recommendations. After loading, the column is washed with 50 column volumes of buffer A and the recombinant protein is eluted with 5 ml of buffer B (50 mM Tris-HCl (pH 8.0), 0.5 M NaCl, 500 mM imidazole).

[0139] The elution profile is monitored by measuring the absorbance of the fractions at 280 nm. Fractions corresponding to the protein peak are pooled, dialyzed against PBS containing 0.5 M arginine, filtered through a 0.22 μm membrane, and stored at −45° C.

[0140] 2.E.2. Insoluble Fraction

[0141] If the target protein is expressed in the insoluble fraction (pellets obtained using the methods described in 2.E.), purification is conducted under denaturing conditions. NaCl, imidazole, and urea are added to the resuspended pellet to final concentrations of 50 mM Tris-HCl (pH 8.0), 0.5 M NaCl, 10 mM imidazole, and 6 M urea (buffer C). After complete solubilization, the mixture is filtered through a 0.45 μm membrane and loaded onto an IMAC column.

[0142] The purification procedures on the IMAC column are the same as are described in 2.E. 1., except that 6 M urea is included in all of the buffers used and 10 column volumes of buffer C are used to wash the column after protein loading, instead of 50 column volumes.

[0143] The protein fractions eluted from the IMAC column with buffer D (buffer C containing 500 mM imidazole) are pooled. Arginine is added to the solution to a final concentration of 0.5 M, and the mixture is dialyzed against PBS containing 0.5 M arginine and various concentrations of urea (4 M, 3 M, 2 M, 1 M, and 0.5 M) to progressively decrease the concentration of urea. The final dialysate is filtered through a 0.22 μm membrane and stored at −45° C.

[0144] Alternatively, when the above-described purification process is not as efficient as it should be, two other processes can be used and are described as follows. A first alternative involves the use of a mild denaturant, N-octyl glucoside (NOG). Briefly, a pellet obtained as is described in 2.E. is homogenized in a solution of 5 mM imidazole, 500 mM sodium chloride, and 20 mM Tris-HCI (pH 7.9) by microfluidization at a pressure of 15,000 psi, and is clarified by centrifugation at 4,000-5,000×g. The pellet is recovered, resuspended in 50 mM NaPO₄ (pH 7.5) containing 1-2 % weight /volume NOG, and homogenized. The NOG-soluble impurities are removed by centrifugation. The pellet is extracted once more by repeating the preceding extraction step. The pellet is dissolved in 8 M urea, 50 mM Tris (pH 8.0). The urea-solubilized protein is diluted with an equal volume of 2 M arginine, 50 mM Tris (pH 8.0), and is dialyzed against 1 M arginine for 24-48 hours to remove the urea. The final dialysate is filtered through a 0.22 μm membrane and stored at −45° C.

[0145] A second alternative involves the use of a strong denaturant, such as guanidine hydrochloride. Briefly, a pellet obtained as is described in 2.E. is homogenized in a solution of 5 mM imidazole, 500 mM sodium chloride, and 20 mM Tris-HCl (pH 7.9) by microfluidization at a pressure of 15,000 psi, and is clarified by centrifugation at 4,000-5,000×g. The pellet is recovered, resuspended in 6 M guanidine hydrochloride, and passed through an IMAC column charged with Ni⁺⁺. The bound antigen is eluted with 8 M urea (pH 8.5). β-mercaptoethanol is added to the eluted protein to a final concentration of 1 mM, and then the eluted protein is passed through a Sephadex G-25 column equilibrated in 0.1 M acetic acid. Protein eluted from the column is slowly added to 4 volumes of 50 mM phosphate buffer (pH 7.0), and the protein remains in solution.

[0146] 2.F. Evaluation of the Protective Activity of the Purified Protein

[0147] Groups of 10 OFl mice (IFFA Credo) are immunized rectally with 25 μg of the purified recombinant protein, admixed with 1 μg of cholera toxin (Berna) in physiological buffer. Mice are immunized on days 0, 7, 14, and 21. Fourteen days after the last immunization, the mice are challenged with H. pylori strain ORV2001, grown in liquid media (the cells are grown on agar plates, as described in 2.A., and, after harvest, are resuspended in Brucella broth; the flasks are then incubated overnight at 37° C.). Fourteen days after challenge, the mice are sacrificed and their stomachs are removed. The amount of H. pylori is determined by measuring the urease activity in the stomach and by culture.

[0148] 2.G. Production of Monospecific Polyclonal Antibodies

[0149] 2.G.1. Hyperimmune Rabbit Antiserum

[0150] New Zealand rabbits are injected both subcutaneously and intramuscularly with 100 μg of a purified fusion polypeptide, as obtained using the methods described in 2.E.1. or 2.E.2., in the presence of Freund's complete adjuvant and in a total volume of approximately 2 ml. Twenty one and 42 days after the initial injection, booster doses, which are identical to the priming doses, except that Freund's incomplete adjuvant is used, are administered in the same way. Fifteen days after the last injection, animal serum is recovered, decomplemented, and filtered through a 0.45 μm membrane.

[0151] 2.G.2. Mouse Hyperimmune Ascites Fluid

[0152] Ten mice are injected subcutaneously with 10-50 μg of a purified fusion polypeptide as obtained using the methods described in 2.E.1. or 2.E.2., in the presence of Freund's complete adjuvant and in a volume of approximately 200 μL. Seven and 14 days after the initial injection, booster doses, which are identical to the priming doses, except that Freund's incomplete adjuvant is used, are administered in the same way. Twenty one and 28 days after the initial infection, mice receive 50 μg of the antigen alone intraperitoneally. On day 21, mice are also injected intraperitoneally with sarcoma 180/TG cells CM26684 (Lennette et al., Diagnostic Procedures for Viral, Rickettsial, and Chlamydial Infections, 5th Ed. Washington D.C., American Public Health Association, 1979). Ascites fluid is collected 10-13 days after the last injection.

### EXAMPLE 3

### Methods for Producing Transcriptional Fusions Lacking His-tags

[0153] Methods for amplification and cloning of DNA encoding the polypeptides of the invention as transcriptional fusions lacking His-tags are described as follows. Two PCR primers for each clone are designed based upon the sequences of the polynucleotides that encode them (see the attached sequence listing, odd numbers, up to SEQ ID NO:363). These primers can be used to amplify DNA encoding the polypeptides of the invention from any H. pylori strain, including, for example, ORV2001 and the strain deposited as ATCC deposit number 43579, as well as from other Helicobacter species.

[0154] The N-terminal primers are designed to include the ribosome binding site of the target gene, the ATG start site, and any signal sequence and cleavage site. The N-terminal primers can include a 5′ clamp and a restriction endonuclease recognition site, such as that for BamHI (GGATCC), which facilitates subsequent cloning. Similarly, the C-terminal primers can include a restriction endonuclease recognition site, such as that for XhoI (CTCGAG), which can be used in subsequent cloning, and a TAA stop codon.

[0155] Amplification of genes encoding the polypeptides of the invention can be carried out using Thermalase DNA Polymerase under the conditions described above in Example 2. Alternatively, Vent DNA polymerase (New England Biolabs), Pwo DNA polymerase (Boehringer Mannheim), or Taq DNA polymerase (Appligene) can be used, according to instructions provided by the manufacturers.

[0156] A single PCR product for each clone is amplified and cloned into appropriately cleaved pET 24 (e.g., BamHI-XhoI cleaved pET 24), resulting in the construction of a transcriptional fusion that permits expression of the proteins without His-tags. The expressed products can be purified as denatured proteins that are refolded by dialysis into 1 M arginine.

[0157] Cloning into pET 24 allows transcription of the genes from the T7 promoter, which is supplied by the vector, but relies upon binding of the RNA-specific DNA polymerase to the intrinsic ribosome binding sites of the genes, and thereby expression of the complete ORF. The amplification, digestion, and cloning protocols that can be used in this method are as described above for constructing translational fusions.

### EXAMPLE 4

### Purification of the Polypeptides of the Invention by Immunoaffinity

[0158] 4.A. Purification of Specific IgGs

[0159] An immune serum, as prepared as is described in section 2.G., is applied to a protein A Sepharose Fast Flow column (Pharmacia) equilibrated in 100 mM Tris-HCl (pH 8.0). The resin is washed by applying 10 column volumes of 100 mM Tris-HCl and 10 volumes of 10 mM Tris-HCl (pH 8.0) to the column. IgG antibodies are eluted with 0.1 M glycine buffer (pH 3.0) and are collected as 5 ml fractions to each of which is added 0.25 ml 1 M Tris-HCl (pH 8.0). The optical density of the eluate is measured at 280 nm and fractions containing the IgG antibodies are pooled, dialyzed against 50 mM Tris-HCl (pH 8.0), and, if necessary, stored frozen at −70° C.

[0160] 4.B. Preparation of the Column

[0161] An appropriate amount of CNBr-activated Sepharose 4B gel (1 g of dried gel provides for approximately 3.5 ml of hydrated gel; gel capacity is from 5 to 10 mg coupled IgG/ml of gel) manufactured by Pharmacia (17-0430-01) is suspended in 1 mM HCl buffer and washed with a buchner by adding small quantities of 1 mM HCl buffer. The total volume of buffer is 200 ml per gram of gel.

[0162] Purified IgG antibodies are dialyzed for 4 hours at 20±5° C. against 50 volumes of 500 mM sodium phosphate buffer (pH 7.5). The antibodies are then diluted in 500 mM phosphate buffer (pH 7.5) to a final concentration of 3 mg/ml.

[0163] IgG antibodies are mixed with the gel overnight at 5±3° C. The gel is packed into a chromatography column and is washed with 2 column volumes of 500 mM phosphate buffer (pH 7.5), and 1 column volume of 50 mM sodium phosphate buffer, containing 500 mM NaCl (pH 7.5). The gel is then transferred to a tube, mixed with 100 mM ethanolamine (pH 7.5) for 4 hours at room temperature, and washed twice with 2 column volumes of PBS. The gel is then stored in 1/10,000 PBS/merthiolate. The amount of IgG antibodies coupled to the gel is determined by measuring the optical density (OD) at 280 nm of the IgG solution and the direct eluate, plus washings.

[0164] 4.C. Adsorption and Elution of the Antigen

[0165] An antigen solution in 50 mM Tris-HCl (pH 8.0), 2 mM EDTA, for example, the supernatant or the solubilized pellet obtained using the methods described in 3.E., after centrifugation and filtration through a 0.45 μm membrane, is applied to a column equilibrated with 50 mM Tris-HCl (pH 8.0), 2 mM EDTA, at a flow rate of about 10 ml/hour. The column is then washed with 20 volumes of 50 mM Tris-HCl (pH 8.0), 2 mM EDTA. Alternatively, adsorption can be achieved by mixing overnight at 5±3° C.

[0166] The adsorbed gel is washed with 2 to 6 volumes of 10 mM sodium phosphate buffer (pH 6.8) and the antigen is eluted with 100 mM glycine buffer (pH 2.5). The eluate is recovered in 3 ml fractions, to each of which is added 150 μl of 1 M sodium phosphate buffer (pH 8.0). Absorption is measured at 280 nm for each fraction; those fractions containing the antigen are pooled and stored at −20° C.

[0167] Other embodiments are within the following claims.

The application's sequence listing, which the Patent Office published only in electronic form, follows.

SEQUENCE LISTING (368 sequences)

SEQ ID NO: 1 - DNA, 1004 bp, Helicobacter pylori
  CDS (56)...(931)
cattaaacgcatgatttttgctacaataataggattttaattatataaaggacaaatgggcatgccaaataggggcgttgttttattagacgggcaagcgctagctgataatatagaaaaagatttgaaacataaaatccaaataataaccgcacaaacgcataaacgccccaaactagccgtgattttagtggggaaagatcccgctagtatcacttatgtcaatatgaagatcaaagcatgcgaaagggtgggcatggattttgacttaaaaaccctccaagaaaatattactgaagccaaattgctatccttgattaaagattacaataccgatcaaaacatttcaggcgttttagtccagctccctttgcccagacacattgatactaaaatgattttagaagccattgacccaaacaaagatgtggatggtttccacccccttaatatcggtaagctctgcactcaaaaagaatcgtttctgccagccacccctatgggcgtgatgcggcttttagagcattaccatattgaaatcaagggtaaggatgtggcgattattggagcgagcaatatcattggcaaacctttaagcatgctcatgctaaacgctggggctagcgtgagcgtgtgccatattttgactaaagacattagtttttacacccaaaacgctgatattgtctgcgtgggcgtgggtaaacctgatttgattaaagcgagcatgttaaaaaaaggggctgtagtggtggatattgggatcaatcatttgaacgatgggcgtatcgtgggcgatgtggattttaacaacgtgcaaaaagtcgccggttttatcacccctgtgcctaaaggcgtggggcctatgacgattgtctcgcttttagaaaacactctaatcgcttttgaaaaacaacaaaggaagggattttaatgaaatttttacgctctgtttatgcattttgctccagttgggtagggacgattgttattgtgctgttggt

SEQ ID NO: 2 - protein, 292 aa, Helicobacter pylori
MGMPNRGVVLLDGQALADNIEKDLKHKIQIITAQTHKRPKLAVILVGKDPASITYVNMKIKACERVGMDFDLKTLQENITEAKLLSLIKDYNTDQNISGVLVQLPLPRHIDTKMILEAIDPNKDVDGFHPLNIGKLCTQKESFLPATPMGVMRLLEHYHIEIKGKDVAIIGASNIIGKPLSMLMLNAGASVSVCHILTKDISFYTQNADIVCVGVGKPDLIKASMLKKGAVVVDIGINHLNDGRIVGDVDFNNVQKVAGFITPVPKGVGPMTIVSLLENTLIAFEKQQRKGF

SEQ ID NO: 3 - DNA, 2162 bp, Helicobacter pylori
  CDS (66)...(2099)
cccttgcttctttttgtcttttttaagactttatctcttgttaaaaaaaggttgtattaacgcttatgaaatccctatctaatgcccttttttcgctctttttaaaaggtttttatttcaccttttttatgagcttgttgtttgtgtttaatcgtatcggctttatcctttatactggctattataagcatgctttaaaaaaccctgtttttgatgaaatcatcaaaaccctattcaatggagccagatatgataatcgtgtggtctcaagcttagcgattctttttatcatcatcgggttattggggttatttatccctaaacaccaaaccaaaatgcttaatattgtggcgtatttttctatcgctattatcctgtttttaaacattgcaaacattgtttattatggtatttatgggaatgtgtttgatgaaaatttattggaatttttgcatgaagacacgctcacgattttaaaaatgagcggggaataccctattttttctagtttttcactctttttaatccttagcgttttaacctcttttatctatttcaaactccaaaacgacctttttaaacccaaaaatgcttatcaagccgcccacaccaaaccccttaaaactttcattttatttgcgcttttttccctcacacaaatgttttacattaacgcgcaattgagttttgtgggcgcgtctttagatctcagcatagagccagccaaagatccttttttaatgaaaattacccccggagcgtttcgcaacctttatcttttagcacgcaattacagacaaagccataaccttaaattcagcgattttgctaaagaaacgcctttagaagtggcgaaaaattatttccatcttaaagagaacccttcaaacaacctctatgagttgctaactcagacaagccgcaacaattccaatcaaaccattcaacatgttttttatatcgtttcagagtctttgagttcatggcattttgatccaaaatttgacgctatagggctaacgagcgctttacaagacttggttaaaaaagagcatgcccacatgctttctgcttttattgaaagcgccccacggaccgttaaaagcctagatgtccaaatcacaggcttaccctatatcaatgataataacttagtcaattcaggggtgatcctccctagctttcctatggcgattggcaatatcacaaaaactctgggttataaaaacaacttttattatgggggtagcgggatttggaacaaactcactagtttcaccaaaaaacaaggttttcacgccctttatttcaataaccatctcttagaatttgcccaaaacaagccctaccctaaacccatagagagcaactggggagtgcatgataatattttatttgactatattttagaaaacaccaacccccatgaaaaaactttcagcatggtcatgactttaagcaaccatgcgatcaaaaacgtgaatctcaaagcctttggcgtgcctttagaaaaaatccaacaatttgtggaaaaaacccccaaatcagaaaatttaccggacgctaattctttagggcatatttactggtatgacaaagtaatcgtcagtttcatcaaaaaagccagccaaaaattccctaactcgctttttatcatcacaggggatcattttgacaggagctatgaatacgctaaaaacgatttgtatatcattaaatccgtgccgcttattttatatgcccctactttaaagcctaaaaaaatcagtcaggtcggatcgcatttagacatcgcccctacgattattgaattagtcgcccctaaaggctttcaattcgtgagttttgggaagcctttattttctaacaatacaacaaaccccccaagccaccccaattacgcgctaggctatgaagcgatcgctaccaaagattatttttataacccaagtttggggttaaggtatttgaacgaaagccctaaagagccaaaggataaacaaaacgacaaaatagaagcttctaagttttatcagcaattagaatctttgaaagcccttagttattacttgctctatcatggggctaatcttaaagattgacaaactaggtttttattccattaaacgcatgatttttgctacaataataggattttaatt

SEQ ID NO: 4 - protein, 678 aa, Helicobacter pylori
MKSLSNALFSLFLKGFYFTFFMSLLFVFNRIGFILYTGYYKHALKNPVFDEIIKTLFNGARYDNRVVSSLAILFIIIGLLGLFIPKHQTKMLNIVAYFSIAIILFLNIANIVYYGIYGNVFDENLLEFLHEDTLTILKMSGEYPIFSSFSLFLILSVLTSFIYFKLQNDLFKPKNAYQAAHTKPLKTFILFALFSLTQMFYINAQLSFVGASLDLSIEPAKDPFLMKITPGAFRNLYLLARNYRQSHNLKFSDFAKETPLEVAKNYFHLKENPSNNLYELLTQTSRNNSNQTIQHVFYIVSESLSSWHFDPKFDAIGLTSALQDLVKKEHAHMLSAFIESAPRTVKSLDVQITGLPYINDNNLVNSGVILPSFPMAIGNITKTLGYKNNFYYGGSGIWNKLTSFTKKQGFHALYFNNHLLEFAQNKPYPKPIESNWGVHDNILFDYILENTNPHEKTFSMVMTLSNHAIKNVNLKAFGVPLEKIQQFVEKTPKSENLPDANSLGHIYWYDKVIVSFIKKASQKFPNSLFIITGDHFDRSYEYAKNDLYIIKSVPLILYAPTLKPKKISQVGSHLDIAPTIIELVAPKGFQFVSFGKPLFSNNTTNPPSHPNYALGYEAIATKDYFYNPSLGLRYLNESPKEPKDKQNDKIEASKFYQQLESLKALSYYLLYHGANLKD

SEQ ID NO: 5 - DNA, 1573 bp, Helicobacter pylori
  CDS (51)...(1520)
tagcccacagctctagcgttttgcctaacatgaatctataagggggatgcatggataaagaaacccgattttacaaccttttttctttggcaattttagggattttgatctttcctgtgggtttggcgaatttttattttggctatgttttgaaagattcgccttgtattttttgctgggcgcaacgcatcaacatgattttaataggggctgtggcgcttttggtggtgcgttttgggtttaagcctaaatacattgccttgctgttgcttatggctagtagcgggttatatgagagcttttatcataccggtagccatgctttagaagatgtggggcagggattcgcgctcgctattttgggcttgcacacgcagttttgggcgctttttgtcttttttagcgtggtggtgcttttagcggttttgctcttttttgcccctaatgcccaacctttcaaagatcattcgttaaacgcgctccaaaaaatcgctttttatgttttctttatggtggttggttctaacgccgtgcaagcgtttatttctaccgggcctttcccttacatagggcaaagcgatccggtgcgtttttcgtggaatttgaaagaatcggtctggtctatggagaattgggatcatttgaaattcccaagaagcgttttgggcagaagggatgtgggcgagcctttgaaattgagcgctttgcctaaagataacgattatgagcgttcgcctttagaaattacaaaaactctaaagattggaaaaaaagaagagctttttttaaaattgaatggagcgatcacggatttgagtttcaatgaagacaaggcgattcttaccacagaaaaccaagggctttatcttgtaagtaacgatttgaaaaccattcatagccatatggtgttggatagctattatagcgcgacggtggggtcgttcgtgggggcggatttcaacgaagatgaaaacattgtgatcatgggcaataataaaacgagcgtggaaatcactcctaacaaaaacgctaacatgcttaaaaacttcccttattttttagaaggggtcaactcttttgacgaagtggaacgcagccgcttgaaaacttctagggcgaaaaactattatgttagcgttgcaagaagaggggctaaattcacttatttgatcagcgctcctaacaagcgttataaggatttgattattatttccatgcgtaatagcgataaacaggtgcatggggagtttttactggaattaggcaatgccaaacttaaagaaaaaaggggattgggcgagttagtcattagcactttggctttaaaggataataaactttatgcgttcagtaaggaatttaacacgcttttagtcatagaccctacaaaagaagagattcttgaagtttatggcttgcctaaagagattaaaaatatcagtgctggagggtttagaaacgatgagcttgtccttgtgagctatgagaataataaaaatattctctacacccttaatttttaaactcttttaaagctacttttttctaatatattaacgcattagaagatggt

SEQ ID NO: 6 - protein, 490 aa, Helicobacter pylori
MDKETRFYNLFSLAILGILIFPVGLANFYFGYVLKDSPCIFCWAQRINMILIGAVALLVVRFGFKPKYIALLLLMASSGLYESFYHTGSHALEDVGQGFALAILGLHTQFWALFVFFSVVVLLAVLLFFAPNAQPFKDHSLNALQKIAFYVFFMVVGSNAVQAFISTGPFPYIGQSDPVRFSWNLKESVWSMENWDHLKFPRSVLGRRDVGEPLKLSALPKDNDYERSPLEITKTLKIGKKEELFLKLNGAITDLSFNEDKAILTTENQGLYLVSNDLKTIHSHMVLDSYYSATVGSFVGADFNEDENIVIMGNNKTSVEITPNKNANMLKNFPYFLEGVNSFDEVERSRLKTSRAKNYYVSVARRGAKFTYLISAPNKRYKDLIIISMRNSDKQVHGEFLLELGNAKLKEKRGLGELVISTLALKDNKLYAFSKEFNTLLVIDPTKEEILEVYGLPKEIKNISAGGFRNDELVLVSYENNKNILYTLNF

SEQ ID NO: 7 - DNA, 679 bp, Helicobacter pylori
  CDS (51)...(626)
tcttaaagatttatgttacactctgtgaaatcaaaatcaaaggggatagcgtgttagaaaaatcttttttaaaaagcaagcaattatttttatgcggactgggtgttttgatgctgcaggcttgcacttgcccaaacacttcacaaaggaattctttcttgcaagatgtgccttattggatgttgcaaaatcgcagtgagtatatcacgcaaggggtggatagctcgcacattgtagatggtaagaaaactgaagagatagaaaaaatcgctaccaaaagagcgacaataagagtggcacaaaatattgtgcataaacttaaagaagcttacctttccaaaaccaatcgcatcaagcaaaagatcactaatgaaatgtttatccaaatgacacagcccatttatgacagcttgatgaatgtggatcgtttagggatttatatcaatcctaacaatgaggaagtgtttgcgttagtgcgcgcgcgtggttttgataaggacgctttgagcgaagggttgcataaaatgtccttagacaatcaagcggtgagtatccttgtggctaaagtggaagaaatctttaaagattctgtcaattacggagatgttaaagtccctatagccatgtaggcttagaacaacaagcgttcctcgctatcgtctgttcttttgggggtggg

SEQ ID NO: 8 - protein, 192 aa, Helicobacter pylori
VLEKSFLKSKQLFLCGLGVLMLQACTCPNTSQRNSFLQDVPYWMLQNRSEYITQGVDSSHIVDGKKTEEIEKIATKRATIRVAQNIVHKLKEAYLSKTNRIKQKITNEMFIQMTQPIYDSLMNVDRLGIYINPNNEEVFALVRARGFDKDALSEGLHKMSLDNQAVSILVAKVEEIFKDSVNYGDVKVPIAM

SEQ ID NO: 9 - DNA, 2386 bp, Helicobacter pylori
  CDS (51)...(2333)
tggggctttttggcgatgggtttatccaaacgaaataataggatattttgatgtataaaacagcgattaatcgtcctattacgaccttaatgtttgctttggcgattgtcttttttgggactatggggtttaaaaaattgagcgtggcgcttttccctaaaattgatttgcctacggtggtggttactacgacttatcctggggctagcgctgaaatcatagagagtaaggtaaccgataagattgaagaagcggtgatggggattgatgggatcaaaaaggttacttccacgagttctaaaaatgtgagtatcgtcgtcattgaatttgagttagaaaaacctaatgaagaagccttaaacgatgtggtgaataaaatttcttcggtgcgttttgatgactctaacattaaaaaaccctctatcaataaatttgataccgacagccaagccattatttcattgtttgtgagcagttcaagcgtgccggctacaacccttaatgactacgctaaaaacaccatcaaacccatgctccaaaaaatcaatggggtagggggcgtgcagctcaacggctttagggagcgccagattaggatttatgcaaatcccactttgatgaataaatacaacctgacttatgcggatcttttcagcacgcttaaagcggagaatgtggaaattgatggggggcgcattgtcaatagccaaagggaattttctattttaatcaatgcgaatagttatagcgttgcggatgtggaaaagattcaagtgggtaatcatgtgcgtcttggcgatattgcaaaaattgaaatcggtttggaagaagacaacacttttgcgagctttaaagacaaacccggtgtgattttagaaatccaaaagattgccggagcgaatgaaattgaaatcgtagatagggtgtatgaagctttaaagcgcattcaagccattagccctaactatgaaatcagaccctttttagacaccacgggctatatccgcacctctattgaagacgtgaaatttgatctagttttaggggcgattttagcggttttagtggtgtttgcgttcttgcgtaacggcacgatcaccctcgtttcagcgatctctatccctatttctatcatggggacttttgcgctcatccaatggatgggcttttcattaaacatgctcaccatggtggctttaacgttggcgatagggattatcattgatgatgcgatcgtggtgattgaaaacatccataaaaagctagaaatgggcatgagtaaacgaaaagcgagctatgagggggtgagagaaattggctttgctctagtggcgatttcagcgatgctgctctctgtttttgtgcctatagggaacatgaaaggcattattgggcgtttttttcaaagttttgggatcacggtggctttagcgatcgctctatcgtatgtggtggtcgttacgattatccccatggtaagctcagtcgtggtcaatcccaggcattctcgtttttatgtgtggagtgagcctttttttaaggctttagagtctcgttataccaagttgctccaatgggtattaaaccacaagatcattatctctatagcggtggttttggtgtttgtgggatcgctttttgtggcttctaagattggtatggagttcatgctgaaagaagatagggggaggtttttggtgtggcttaaggctaaaccgggcgtgagcatagattacatgacacaaaagagtaagatctttcaaaaagcgattgaaaaacatgctgaagtggaattcaccaccttgcaagtgggttatggcaccacacaaaacccttttaaggctaagatttttgtgcaactcaagcctttaaaagagcgtaaaaaagagcatcaattggggcaatttgagttgatgagcgttttaaggaaagagttgagaagcttgcctgaagctaaaggtttagatactattaatctttctgaagttactcttatagggggcggtggggatagttcgcccttccaaacctttgtgttttcccattctcaagaagcggtggataaaagcgtggagaatttgaaaaaattcttattagaaagccctgaattaaaaggcaaggttgaaagctatcatacaagcacgagcgaatcgcaaccgcaattgcaactcaaaatcttaagacaaaacgctaacaaatacggcgtgagcgctcaaaccattggatcagtggtgagctctgctttttctgggacttctcaagcgagcgtgttcaaagaagatggcaaagaatacgacatgatcttagagtgcctgatgacaagcgcgtttctgtagaagacatcaaacgcttgcaagtgcgtaacaaatacgataaattgatgttt

SEQ ID NO: 10 - protein, 761 aa, Helicobacter pylori
MYKTAINRPITTLMFALAIVFFGTMGFKKLSVALFPKIDLPTVVVTTTYPGASAEIIESKVTDKIEEAVMGIDGIKKVTSTSSKNVSIVVIEFELEKPNEEALNDVVNKISSVRFDDSNIKKPSINKFDTDSQAIISLFVSSSSVPATTLNDYAKNTIKPMLQKINGVGGVQLNGFRERQIRIYANPTLMNKYNLTYADLFSTLKAENVEIDGGRIVNSQREFSILINANSYSVADVEKIQVGNHVRLGDIAKIEIGLEEDNTFASFKDKPGVILEIQKIAGANEIEIVDRVYEALKRIQAISPNYEIRPFLDTTGYIRTSIEDVKFDLVLGAILAVLVVFAFLRNGTITLVSAISIPISIMGTFALIQWMGFSLNMLTMVALTLAIGIIIDDAIVVIENIHKKLEMGMSKRKASYEGVREIGFALVAISAMLLSVFVPIGNMKGIIGRFFQSFGITVALAIALSYVVVVTIIPMVSSVVVNPRHSRFYVWSEPFFKALESRYTKLLQWVLNHKIIISIAVVLVFVGSLFVASKIGMEFMLKEDRGRFLVWLKAKPGVSIDYMTQKSKIFQKAIEKHAEVEFTTLQVGYGTTQNPFKAKIFVQLKPLKERKKEHQLGQFELMSVLRKELRSLPEAKGLDTINLSEVTLIGGGGDSSPFQTFVFSHSQEAVDKSVENLKKFLLESPELKGKVESYHTSTSESQPQLQLKILRQNANKYGVSAQTIGSVVSSAFSGTSQASVFKEDGKEYDMILECLMTSAFL

SEQ ID NO: 11 - DNA, 6025 bp, Helicobacter pylori
  CDS (51)...(5972)
ttacacgcttttaagcggaaatagtatcaaatacaataaccaagctttagcgggacaatgctttttcaaaaaatttatggaatttaatccattatggtggcgaacaagggactctattaagagcggataacaacaccttttttgtgcaattcacccaaagcaacggccaaaaatttgtttttgaagaaacttttaatccgggctctatcacctataaatatttcactatccattcttcgcttttccacacagacgctgattctaaggatatttggagtcaagtgaggaagcaatttgatttcattccaggaaaaacccctgtgtgtgttggcgtgtgctatatcgcgccttataaaaatcaagaccttattggctctagcgcttttgcgtggtcgctgaactttggggccacggtggtagggactttgcttttagggagcgctcaagaaaaagccaataataatggcggatcgatctggtttggtaagaataatttgctgtatttgcatggcaatttcaacgcgactaatatctttttaacgaataattttaatgtcggcaaccctaacgctggcggtggggcgacgattaattttaacgctgatgaaaccttgaacgctgacgggttaaattacacgaatttccaaaccgtggctttgggcttacaaaccagtgcgagccagcattcatgggcgaattttaattccaagctttctatggagattaaaaattctaactttagggatttcacatggggaggctttaattttaattcagggcgtatcacttttgaaaacaccacttttagcggctggaccaatattaacggagcgactgagagcggctcatcgtatgtgaatatggttgcgaatacggatttgatattttctaattccattttaggagggggcattcgctatgatttgaaagctaataacattattttcaataactctcaaatggttattgatgtgtctaagaatgtgaatcagtcatcattgaatgggaatgttactttcaataattccaggctttcagtcaagcccaatgcggctattaatattggggatagccaaacccaaacggctttagaaaacgcttcaagcctttctttttacaacaacagcgtggcgaattttaacggcacaaccgcttttaacggggtgtcttatttgaatttgaaccctaacgctcaagtaagcttcaatcaagtaaatttcaataacgctaatgtaactttttatggcattcctttatttggtaaaacgcctgattttggcaactctgcacgccttatcaatttcaaagggaatacgaattttaatcaagccacgctcaatttaagggctaaaaatatccatatcaatttccaaggcgtttctacttttaaacaaaactctacgatgaatttagctgaaagttcccaagcgagctttaacgctcttaaagtggaaggggaaacgaatttcaatctcaataactcaagcttgttgaatttcaatggcaatagcgttttcaacgctcctgtgagtttttatgctaatcattctcaaatttctttcactaaattagcgacttttaattctgacgcttcttttgatttaagcaacaacagcaccctgaattttcaaagcgttcttttaaatggtgctctaaaccttttaggcaatggcagtaacaatctagcgatcaacgctaaagggaattttagttttgggtctaaagggattttgaatctgtcttatatgaatctatttgggggggataaaaaaacttccgtttatgatgtgttgcaagcccaaaatattgatggcttaatggggaataacggctatgagaagatccgtttttatggcatacagattgacaaggctgattactcgtttgataacggcgttcattcttggagattcactaacccgctcaatacgactgaaacgattacagaaaccttgcataacaaccgcttgaaagtgcagatctctcaaaacggcgtttctaataataagatgttcaatctcgctcctagcttgtatgattaccaaaaaaacccttataatgaaaccgagaattcctataattacacaagcgataaggttggcacttattatttaacgagcaatatcaaaggctttaatcaaaacaataaaacacccgggacttataacgcgcaaaaccaacccttacaagccttacacatttacaatcaggctatcactaagcaagatttgaacatgatcgccagtttgggtaaggagtttttgcctaaaatagccaatcttttatcttcaggggctttggataatctcaatagcccgaatagttttgaaactctttttggtatctttgaaaagtatggtatcactttaaaccaagaaaattggaagagcttattaaagattatcaataatttttccaacacaactaattatgatttctctcaaggcaatctcgttgtaggagcgatcaaagaggggcaaacgaacactaaaagcgtggtgtggtttggaggcgaaggctataaagagccatgtgcggttggggataacacttgccagatgttcagacagactaatttagggcaattgctccattctagtacgccttatttaggctacattaacgctaattttagggctaaaaacatttacattaccggaaccatcggcagcgggaacgcttgggggagtggagggagtgcgaatgtgtcttttgaaagcggcactaatttagtgcttaatcaagctaagattgacgctcaagggaccgataaaatcttttcttacttggggcaagggggtattgaaaagctttttggagaaaaaggtttagggaatgcgctttctaatatcatttatgaagagagcttgaatgataacgctatccctaaagatttagccaacatgatccctaaagattttggatctaagactttaagctcattgcttagccctactgaagtgaataacctcttaggcgtgagcgcattcaaaaacgcgatcatggaaattttaaattctaaaacggtgggcgatgtttttggtgaaaacgggcttttaaacgcgctagatcctacggaaagaaaaaaaattgatcaaatgcttttagagcaaatccaagcccattcttcagggtttgaaaaattcatcgtgaaaactttagggattgaaaatgtagagaatttcatcaataactggtatggcaagcaaagcttgagttcttttgccaataattttgtgcctggaggcttgaatcaagcccttgataaaataggctctagctctgatgccaaagacttacagaacttcttggataaaacgacttttggggatattttaaatcaaatgattgaacaagcccccttaatcaataaactcatttcttggctgggtccgcaggatttgagcgttttagtgaatatcgctttaaatagcatcactaaccctagtaaagagctgactagcaccatttctagcataggtgaaaaagcgttaaatgacttattaggcgatggcgtagtgaataaaatcatgagcaatcaagtcttagggcaaatgatcaataaaatcattgctgataagggctttggaggcgtttatcagcaaggtttaggctccatactgcctcaatctttacaagatgaattgaagaaattgggcatgggctctttactaggatctagggggttgcacaatctttggcaaagagggaatttcaattttgtggctaaagattatttattcactaataacagctcgtttagtaacgccacagggggggaattgaattttgtggcgggcaagtctattatttttaacgggaaaaatacgatcaatttcacgcagtatcagggtaagctttcgtttatttctaaagatttttctaacatttcattagataccttaaacgctactaacggattaacgcttaatgctcctaaaaatgacattagcgttcaaaaaggtcagatttgcgtgaatgttttaaattgcatgggcgagaaaaaagctcattcttcaagcgcgacagccccaaccaatgaaacactagaagcgaatgcgaataatttcgcttttttaggtgcaattaaggctaatggattagtggatttttcaaaagttttacaaaatactacgatcgggactttagatttagggccaaacgctacttttaaagcgaatcatttgatcgtgaataacgcttttaacaataactctaattacagggctgatattagcggtaatctcaatgtggttaaaggagcggctctcagcacgaatgaaaatggtttgaatgtggggggcgatttcaagagcgaagggtcattaatctttaatcttaacaataaaaccaatcaaacgattattaatgtggctggcaattctacgatcatgtcttataacaatcaagctttaatccattttaatacccaactcaagcaaggcgcttacacgcttattaatgcgaaacgcatgctttatggttatgacaatcaaatcattcgtggagggagcttgagcgattacctcaagctttacaccctcattgattttaacggcaaacgcatgcaattaaacggcgattcactaagctatgacaaccaaccggtcaatattaaagatgggggtcttgtggtaagctttaaagacaatcaggggcaaatggtgtattcatctatcctttatgataaagttcaagttagcgtctctgataagcccatggatattcatgcccctagtttggagtattacattaaatacattcaaggcagtgctggtttggatgcgatcaaatctgcaggcaataattccattctgtggttgaatgagctttttgtggctaaagggggtaatcccttgttcgctccttattatttgcaagacaatcccactgaacacattgttactttaatgaaagatattactagcgctttaggcatgctttctaaacccaatcttaaaaacaattccaccgatgctttacagctcaacacttacacgcaacaaatgagccgtttagccaagctttctaatttcgcttcctttgattcaacggattttagcgaacgcttgagcagtcttaaaaaccaaagatttgctgatgcaatccctaatgcgatggatgtgattttaaaatactctcaaagggataaactaaaaaacaacctttgggcgaccggcgttgggggcgtgagctttgtggaaaatggcacaggaacgctctatggtgtcaatgtgggctatgacagattcattaagggtgtgattgttggagggtatgcggcttatgggtatagcggtttttatgaacgcatcactaattctaaatccgataatgtggatgtgggcttgtatgcgagggctttcattaaaaagagcgagctaacctttagcgtcaatgaaacttggggggctaataaaaaccaaatcagctccaacgacactctgctttctatgatcaatcagtcctataaatacagcacatggacgacgaacgcaaaagttaattacgggtatgatttcatgtttaaaaacaaaagcatcattttaaaacctcaaattggtttaaggtattactatatcggcatgaccggtttagaaggggtgatgcataatgcgctctataaccagtttaaagcgaacgccgatccgtctaaaaaatccgttttaacgattgaacttgctttggagaaccgccattatttcaacacaaactcttatttttatgcgattggcggctttggtagagacttattagttaattctatgggggataaattggtgcgttttattggtaacaacactttgagctacaggaaaggcgagctttataacacttttgcgagcatcactacaggcggggaagtgaggttgtttaaaagcttttatgcgaatgctggggtgggggctaggtttggattggactataaaatgatcaacattaccggaaatattggaatgcgtttagcgttttaaaaggtgggggcttaccccttttttgagccattaaataaatcaatggtggg

SEQ ID NO: 12 - protein, 1974 aa, Helicobacter pylori
RDNAFSKNLWNLIHYGGEQGTLLRADNNTFFVQFTQSNGQKFVFEETFNPGSITYKYFTIHSSLFHTDADSKDIWSQVRKQFDFIPGKTPVCVGVCYIAPYKNQDLIGSSAFAWSLNFGATVVGTLLLGSAQEKANNNGGSIWFGKNNLLYLHGNFNATNIFLTNNFNVGNPNAGGGATINFNADETLNADGLNYTNFQTVALGLQTSASQHSWANFNSKLSMEIKNSNFRDFTWGGFNFNSGRITFENTTFSGWTNINGATESGSSYVNMVANTDLIFSNSILGGGIRYDLKANNIIFNNSQMVIDVSKNVNQSSLNGNVTFNNSRLSVKPNAAINIGDSQTQTALENASSLSFYNNSVANFNGTTAFNGVSYLNLNPNAQVSFNQVNFNNANVTFYGIPLFGKTPDFGNSARLINFKGNTNFNQATLNLRAKNIHINFQGVSTFKQNSTMNLAESSQASFNALKVEGETNFNLNNSSLLNFNGNSVFNAPVSFYANHSQISFTKLATFNSDASFDLSNNSTLNFQSVLLNGALNLLGNGSNNLAINAKGNFSFGSKGILNLSYMNLFGGDKKTSVYDVLQAQNIDGLMGNNGYEKIRFYGIQIDKADYSFDNGVHSWRFTNPLNTTETITETLHNNRLKVQISQNGVSNNKMFNLAPSLYDYQKNPYNETENSYNYTSDKVGTYYLTSNIKGFNQNNKTPGTYNAQNQPLQALHIYNQAITKQDLNMIASLGKEFLPKIANLLSSGALDNLNSPNSFETLFGIFEKYGITLNQENWKSLLKIINNFSNTTNYDFSQGNLVVGAIKEGQTNTKSVVWFGGEGYKEPCAVGDNTCQMFRQTNLGQLLHSSTPYLGYINANFRAKNIYITGTIGSGNAWGSGGSANVSFESGTNLVLNQAKIDAQGTDKIFSYLGQGGIEKLFGEKGLGNALSNIIYEESLNDNAIPKDLANMIPKDFGSKTLSSLLSPTEVNNLLGVSAFKNAIMEILNSKTVGDVFGENGLLNALDPTERKKIDQMLLEQIQAHSSGFEKFIVKTLGIENVENFINNWYGKQSLSSFANNFVPGGLNQALDKIGSSSDAKDLQNFLDKTTFGDILNQMIEQAPLINKLISWLGPQDLSVLVNIALNSITNPSKELTSTISSIGEKALNDLLGDGVVNKIMSNQVLGQMINKIIADKGFGGVYQQGLGSILPQSLQDELKKLGMGSLLGSRGLHNLWQRGNFNFVAKDYLFTNNSSFSNATGGELNFVAGKSIIFNGKNTINFTQYQGKLSFISKDFSNISLDTLNATNGLTLNAPKNDISVQKGQICVNVLNCMGEKKAHSSSATAPTNETLEANANNFAFLGAIKANGLVDFSKVLQNTTIGTLDLGPNATFKANHLIVNNAFNNNSNYRADISGNLNVVKGAALSTNENGLNVGGDFKSEGSLIFNLNNKTNQTIINVAGNSTIMSYNNQALIHFNTQLKQGAYTLINAKRMLYGYDNQIIRGGSLSDYLKLYTLIDFNGKRMQLNGDSLSYDNQPVNIKDGGLVVSFKDNQGQMVYSSILYDKVQVSVSDKPMDIHAPSLEYYIKYIQGSAGLDAIKSAGNNSILWLNELFVAKGGNPLFAPYYLQDNPTEHIVTLMKDITSALGMLSKPNLKNNSTDALQLNTYTQQMSRLAKLSNFASFDSTDFSERLSSLKNQRFADAIPNAMDVILKYSQRDKLKNNLWATGVGGVSFVENGTGTLYGVNVGYDRFIKGVIVGGYAAYGYSGFYERITNSKSDNVDVGLYARAFIKKSELTFSVNETWGANKNQISSNDTLLSMINQSYKYSTWTTNAKVNYGYDFMFKNKSIILKPQIGLRYYYIGMTGLEGVMHNALYNQFKANADPSKKSVLTIELALENRHYFNTNSYFYAIGGFGRDLLVNSMGDKLVRFIGNNTLSYRKGELYNTFASITTGGEVRLFKSFYANAGVGARFGLDYKMINITGNIGMRLAF

SEQ ID NO: 13 - DNA, 755 bp, Helicobacter pylori
  CDS (124)...(690)
ttgcgcttataaattcccggctttagaaaaacacaccaaaattgtaggagtcattaaccaagtggggcgcassgggcgatcacaccggtcgctcttttagagcctgtggaaattgctggagctatgattaatagagcgaccttacacaattattctgaaattgaaaaaaagaatatcatgctcagtgatagggtcgttgtcattagaagcggcgatgtgatccctaaaatcatcaagcctttagaatcttatagagacggctcgcaacataaaattgaacgccccaaggtttgccctatatgttcgcatgagcttttgtgcgaagagatttttacttattgtcaaaaccttaattgcccggcaaggttgaaagaaagcttgattcatttcgcttctaaagacgctttaaacattcaaggcttgggcgataaagtcatagagcaactttttgaagaaaagctcatttttaacgctctggatttgtatgctttaaaattagaagatttaatgcggctagacaaatttaaaattaaaaaagctcaaaatctattagacgctattttaaaaagcaaaaaccctcccttatggcgtttgattaacgctttagggattgagcatattggtaagggagcgagtaaaacgctggccaaatacggcttaaatgtgttagaaaaaagcgaascgagtttttagaaatggaaggctttggggtggaaatggcgcgctctttagtcaatttttatgcgagcaatcaa

SEQ ID NO: 14 - protein, 189 aa, Helicobacter pylori
  VARIANT 187: Xaa = Any Amino Acid
MINRATLHNYSEIEKKNIMLSDRVVVIRSGDVIPKIIKPLESYRDGSQHKIERPKVCPICSHELLCEEIFTYCQNLNCPARLKESLIHFASKDALNIQGLGDKVIEQLFEEKLIFNALDLYALKLEDLMRLDKFKIKKAQNLLDAILKSKNPPLWRLINALGIEHIGKGASKTLAKYGLNVLEKSEXSF

SEQ ID NO: 15 - DNA, 403 bp, Helicobacter pylori
  CDS (51)...(350)
aaagggcgattatcaaggggctttcaagcttttttcccaatcgtgcgataatggtaatgcggccgggtgttttgcaagtgggggcgatgtatgctaatggggtagggatccaaaccaacagattaaaagccgctcgctattatgaatgggttgcagcgggggcgatgcgaccgcttgcgcgaatctggctcagatgtatgaaaacaagaaaaatgcggattcaaacgataaagaaaacgctttgcaattgtatgcggtggcttgtcaagggggggatatgctcgcatgcaataatttggggtggatgtttgctaacggaagtggggtcccaaaagattattacaaagcgataagttattataaattttcatgcgagaatgggaatgatatggggtgttataat

SEQ ID NO: 16 - protein, 100 aa, Helicobacter pylori
MVMRPGVLQVGAMYANGVGIQTNRLKAARYYEWVAAGAMRPLARIWLRCMKTRKMRIQTIKKTLCNCMRWLVKGGICSHAIIWGGCLLTEVGSQKIITKR

SEQ ID NO: 17 - DNA, 1837 bp, Helicobacter pylori
  CDS (51)...(1784)
cgcatgcgctcctttctaaagcgatcaaaaacaaagagtaagggattaacatgtcaaaaaaaatcgtagtcgatcctatcactaggattgaggggcatttaaggattgaagtgatcgtagatgatgataacgtgatcactgatgcgttttcttcttctacgctttttagggggctagaaaccattattaaaggcagagatccacgagatgcaggcttcatcgctcaaaggatttgcggggtatgcacttattcgcattataaggccggtatcacggcggtagaaaacgctctaggcatcactcccccattaaacgcgcaattggtgcgatctttgatgaacatggcgctgctttttcatgaccatgtggtgcatttctatactttgcatgggcttgattggtgcgatatcatgagcgctttaaaagccgatcccattcaagcggcaaaactttctttcaaatacagcccttaccctattaataccggtgccggtgaattaaaagcggttcaaaaacgcttgagcgatttcgctaaaagcggatctttggggcctttcagtaacggctattacgggcataaaacttatcgtttaagtccggagcaaaatttaatcgtcttaagccactacctcaagcttttagaaatccaaagggaagcggcgaaaatgaccgctatttttggggccaaacagcctcacccacaaagcctaacggtggggggtgttacgagtgttatggatatattggatccgacgagattggctgaatggaagagcaagtttgaagtggtggccaatttcatcaaccatgcttactaccctgatttggtgatggcaggcgaaatgttcgctaacgaacaatccgttatcaaaggctgtggcttaaggaattttatcgcttatgaagaagtgctgcttgggagggataaataccttttgagtagtggggtggtgcttgatggggatatttctaaattacaccccattgatgaaagtttgattaaagaagaagttacgcattcttggtatcaatacgaagacactaaagaagtgcaactccacccttatgacgggcaaacgaacccgcattataccggtttaaaagacggcgagagcgtggggattgaaaataaaatcatccctgctaaagtgcttgacactaaaaataaatattcttggataaaatcgcccagatacgatagtaagcccatggaagtaggtcctttaagttccgtagtggtaggtttagcggcgaaaaacccttatgttactgaagtggctacgaagtttttaaaagacactaaactgcctttagaggcgttgttttcaacgcttgggcgaacagctgcaaggtgtattgaagctaaaacgatcgctgataatggccttttggcgtttgatgcgttagtggaaaatctaaaaagcgatcaaagcacttgtgctccttatcacattgataaaaatcaagaatataaagggcgctacattggtcaagtgccaaggggcatgctaagccattgggtgcgtattaaaaacggcgtggtggaaaattatcaagcggtggtgccttctacttggaatgcagggcctagagattctcaaaatcaaaggggggcttatgaaatgagcttgattggcactaaaatcgctgatttaacccagcctttagaaatcattaggactatccattcttttgacccatgcatcgcatgctcggtgcatgtgatggattttaaagggcagtctttaaacgagtttaaagtagagcctaatttcgctaaattctaaaaagggttacgcatggataaaatgaataaggtcgttttacacaaagaata

SEQ ID NO: 18 - protein, 578 aa, Helicobacter pylori
MSKKIVVDPITRIEGHLRIEVIVDDDNVITDAFSSSTLFRGLETIIKGRDPRDAGFIAQRICGVCTYSHYKAGITAVENALGITPPLNAQLVRSLMNMALLFHDHVVHFYTLHGLDWCDIMSALKADPIQAAKLSFKYSPYPINTGAGELKAVQKRLSDFAKSGSLGPFSNGYYGHKTYRLSPEQNLIVLSHYLKLLEIQREAAKMTAIFGAKQPHPQSLTVGGVTSVMDILDPTRLAEWKSKFEVVANFINHAYYPDLVMAGEMFANEQSVIKGCGLRNFIAYEEVLLGRDKYLLSSGVVLDGDISKLHPIDESLIKEEVTHSWYQYEDTKEVQLHPYDGQTNPHYTGLKDGESVGIENKIIPAKVLDTKNKYSWIKSPRYDSKPMEVGPLSSVVVGLAAKNPYVTEVATKFLKDTKLPLEALFSTLGRTAARCIEAKTIADNGLLAFDALVENLKSDQSTCAPYHIDKNQEYKGRYIGQVPRGMLSHWVRIKNGVVENYQAVVPSTWNAGPRDSQNQRGAYEMSLIGTKIADLTQPLEIIRTIHSFDPCIACSVHVMDFKGQSLNEFKVEPNFAKF

SEQ ID NO: 19 - DNA, 720 bp, Helicobacter pylori
  CDS (80)...(613)
atatggtgtttttccattctatcaggtatgaaagttcgggggcggattctatgattaatggctatggttataccaaagaatgagtcaaaaaatcctaattctaggtattggcaatatcctttttggcgatgaagggattggggtgcatttagcccactacctcaaaaaaaatttttcttttttccctagcgtggatattatagatggggggacaatggcccagcagctcattcctttaatcacttcgtatgaaaaggttttgattttggattgcgtgagcgctgaaggcgttgagataggatcagtctatgcttttgattttaaggacgctcctaaagaaatcacatgggctgggagcgctcatgaagtggaaatgctacacactttaaggctcacggagtttttaggggatttgcctaaaacttttatcgtggggcttgtgccttttgtgatagggagcgagaccactttcaagctttcaagcaaaattttaaacgctttagaaaccgccttaaaagccatagaaacccaactcaacgcatggggggttaaaatgcaacgcaccgatcatatcgctttagaatgtatcgctgaactttcttataagggtttttgaattggtttttgtttttctttttaaatgcgttaatgaagaaacaagcctgaattttacgccccttttagagcgaatggcatgcaatttgcaagcgcgtttttata

SEQ ID NO: 20 - protein, 178 aa, Helicobacter pylori
MSQKILILGIGNILFGDEGIGVHLAHYLKKNFSFFPSVDIIDGGTMAQQLIPLITSYEKVLILDCVSAEGVEIGSVYAFDFKDAPKEITWAGSAHEVEMLHTLRLTEFLGDLPKTFIVGLVPFVIGSETTFKLSSKILNALETALKAIETQLNAWGVKMQRTDHIALECIAELSYKGF

SEQ ID NO: 21 - DNA, 508 bp, Helicobacter pylori
  CDS (51)...(455)
attgaagcgagtaacgcttattataaaaaacgcttataaatcttatcaacatgggcaatttgacttattacgcttacatgtatttgatcctctttgtatgcttgctgcctgtgttattaatggggcttgtttggaggcttactcgcccccccttaaagcaaaatattcctaataaaagcctctctttagaaaatttaaacgaacaaatcaaaaaccttaaaagcgtaccagctttagaaaaactgaaaaacgacttcaatgagcgttttaaaatttgccccaaagataaagaaactctgtggttagaaacgatccaaaaattagtcgcttcagaattttttgaattagaagacgctattaattttgggcaagaattagaaaacgctaaccctaattaccaacaaaaaatcgctaacgctaccggcttagcccttaagaataaaaaagaaaaaggatagaattggattttttagagattgtaggacaagtccctttaaaaggagaggta

SEQ ID NO: 22 - protein, 135 aa, Helicobacter pylori
MGNLTYYAYMYLILFVCLLPVLLMGLVWRLTRPPLKQNIPNKSLSLENLNEQIKNLKSVPALEKLKNDFNERFKICPKDKETLWLETIQKLVASEFFELEDAINFGQELENANPNYQQKIANATGLALKNKKEKG

SEQ ID NO: 23 - DNA, 1183 bp, Helicobacter pylori
  CDS (51)...(1130)
atctaaaaatgctacaatgtttatctttaaaacgaaagggcaatttaaccatggactttttagaaaaagtattagacaatcaagttactgaaagtaaagaattggtcaggctttatgattatgatttatacacgctaggggaagtagcggatcgcatgcgccaaaacatgcaccaaaaaatcgtgtattttaatgtcaataggcatttaaaccctagcaatatttgcgcggacgcttgcaaattttgcgctttttcagcccacagaaaaaacccaaacccttatgaaatgagcttagaagaaatcctagaaaaggttaaaaactcctacaacaaggggattaaagaagtccatatcgtgagcgctcataaccctaattactcctatgaatggtatttaaaggtgtttgaaaccatcaagcaagaaatgcctaacttgcatttaaaggccatgaccgctgcagaagtgcattttttaagcgttaaattcaacaaaccttttgaattggtgctagaagacatgctcaaagccggggtggattccatgcctggtgggggggcggagatttttgatgaagaaatcaggcgtaaaatctgtaatggtaaggtgggatcttctcggtggttagaaatccatgcttattggcacaaattaggcaaaatgagtaacgctaccatgctttttgggcatattgaaaataaaatccatcgcatcgatcacatgctaagaatcaaaaaaatccaaagccctaaaaatcaagtagaaaacaaagaagggggttttaacgcttttatccccttgttgtatcaaaaagaaaacaattatttgaatgtggaaaaatcccccagtgcgatagaaatcttaaaaaccatcgccatatctcgcattcttttaaacaatatccctcacattaaagcttattgggcgactttgggcttgaatttggctttagtggctcaagaatttggcgctaacgatttagacggcacgatagagatagagagcattcaaagcgcggcaggcgcaaagagccggcatggtttagaaaaagaagatttgatatttaaaatcaaggacgctggttttgttgcggtagaaagggatagtttgtataattttatacagaaattttaataatttttagcgtttttaagaatgattagttataataacgctactaacaa

SEQ ID NO: 24 - protein, 360 aa, Helicobacter pylori
MDFLEKVLDNQVTESKELVRLYDYDLYTLGEVADRMRQNMHQKIVYFNVNRHLNPSNICADACKFCAFSAHRKNPNPYEMSLEEILEKVKNSYNKGIKEVHIVSAHNPNYSYEWYLKVFETIKQEMPNLHLKAMTAAEVHFLSVKFNKPFELVLEDMLKAGVDSMPGGGAEIFDEEIRRKICNGKVGSSRWLEIHAYWHKLGKMSNATMLFGHIENKIHRIDHMLRIKKIQSPKNQVENKEGGFNAFIPLLYQKENNYLNVEKSPSAIEILKTIAISRILLNNIPHIKAYWATLGLNLALVAQEFGANDLDGTIEIESIQSAAGAKSRHGLEKEDLIFKIKDAGFVAVERDSLYNFIQKF

SEQ ID NO: 25 - DNA, 616 bp, Helicobacter pylori
  CDS (51)...(563)
taatgagaattaaacgaaattggatacaatcagcttaaaaaggatataaagtggaaaaattacctaaaaaacgagtttctaaaaccaaatcacaaaaacttatccatagcttaaccacccaaaaaaacagagcctttctcaaaaaaatcagcgctaatgaaatgcttttagaattagaaaaaggggcgtttaaaaaaaatgaagcttattttatttctgatgaagaagataaaaattatgttttggtgccagataacgtgatctctcttttggcagaaaacgccagaaaggcttttgaagccaggcttagggcggaattagaaagggatattatcacccaagcgccgattgattttgaagacgtgcgcgaagtttccttgcaactattggaaaatttacgccaaaaagatgggaatttgcctaatatcaacaccttaaactttgtcaaacaaatcaaaaaagaacaccctaatttattctttaattttgacaacatgttcaaacaacccccttttaatgagaataattttgaaaattttgacaatagcgatgaggaaaatttttaatgcaaaccattgattttgaaaaattttcacaatattccaagcccggccca

SEQ ID NO: 26 - protein, 171 aa, Helicobacter pylori
VEKLPKKRVSKTKSQKLIHSLTTQKNRAFLKKISANEMLLELEKGAFKKNEAYFISDEEDKNYVLVPDNVISLLAENARKAFEARLRAELERDIITQAPIDFEDVREVSLQLLENLRQKDGNLPNINTLNFVKQIKKEHPNLFFNFDNMFKQPPFNENNFENFDNSDEENF

SEQ ID NO: 27 - DNA, 952 bp, Helicobacter pylori
  CDS (51)...(899)
gagtttgacgcgtatttgcgtgggggcgaaaaacatttcagtaaaacgctatgaatgaaaatattaatgaaaatatttttgaagaagtaggggacgcttgcgttaaatgcgctaagtgcgtgccaggctgcaccatataccgcattcataaagacgaggcgacttcgcctagaggctttttagatttgatgcgcttaaacgctcaaaacaagctccaattagacacgaatttaaaacaccttttagaaacttgctttttatgcaccgcttgcgtggaaatttgcccttttcatttgcccatagacaccttaatagaaaaagccagagaaaaaatcgctcaaaagcatggcatcgcttggtataaaaaatcctatttttcccttttaaaaaaccgcaaaaaaatggatagggtgttttcaactgcgcattttttagccccttgcgttttcaagcaagtaggggatagtttagagcctagggcggtgtttaaaggtttgttcaaacgctttaaaaaaagcgcgctgcctcctttaaatcaaaaaagttttttacaaaagcatgcagaaatgaagcttttagaaaaccccattcaaaaagtggccatttttatagggtgcttgagcaattaccattaccagcaagtgggggaaagcttgttgtatattttagaaaaactcaacattcaagcgatcatccctaagcaagaatgctgctcagcgcctgcgtattttaccggcgataaagacaccacgctttttttagtgaaaaaaaacatagaatggtttgaaagctatttagataaagtggatgcgatcattgtgcctgaagccacatgcgctacatgctcatcaacgattattacaaggtgtttttgggcgaaaaagataaggatttgtatgtgaagcgcttggaaaaaatcacgcctaaaatctatctggcgagcgtgttttta

SEQ ID NO: 28 - protein, 283 aa, Helicobacter pylori
MNENINENIFEEVGDACVKCAKCVPGCTIYRIHKDEATSPRGFLDLMRLNAQNKLQLDTNLKHLLETCFLCTACVEICPFHLPIDTLIEKAREKIAQKHGIAWYKKSYFSLLKNRKKMDRVFSTAHFLAPCVFKQVGDSLEPRAVFKGLFKRFKKSALPPLNQKSFLQKHAEMKLLENPIQKVAIFIGCLSNYHYQQVGESLLYILEKLNIQAIIPKQECCSAPAYFTGDKDTTLFLVKKNIEWFESYLDKVDAIIVPEATCATCSSTIITRCFWAKKIRICM

SEQ ID NO: 29 - DNA, 1361 bp, Helicobacter pylori
  CDS (49)...(1305)
tattgatagcatgagttgtttttggtttggaattttaaggagtagcttatgaaagagcaatcaatgattgattttttaaaacttagagattatgacattagaaaaacacaaaatgcgcgatggatagatcaaaaatgcacccctgatgtgttgtctcttgttgctgattgtattttagagtttacgcaatgtaatattggaaaatcattttctattagggatatttgggatagcccttacaccaatgaaaatgttaaaatgattttttctaaacctgatttaaattctgacttttccatgcatgaatacgataagtttttttctcagcctattaaattattagcctatagcggtattttatttgaaacaaaaactggcaatagaaatatttataccatacaaaacatagagctattagaatatctcatgcaaagagaaacaaacgctttgaaattccttattttatatattcaaaaggtattaatggatagtgggatttatcctttatttgacaactttttacaaaaacaagacacagaaagttttaagcaactaaaagatggtttcactcattttactatcaataacacagcaatcaataacgctacggaatgttttaggatttttactaaaattatcaatcctttagctttttattatggtaaaaaaggcacaagaaaagggtatttgtccaacactataattacaaaagatgagcttaattataatcgtatcaattggcgagatataggaaaagataaaaataccaccagacaagaatacgatcttataaactctaaaaggattgctaattctaactatcttatttcaaaagctaagaaagtggtgaaacgatataatgatagatttaataattctctctctgaagtaaaacaagaaaaagaagagtcgcaagccacacaaatacaccatatttttcccatccaagactttcccattattgctaactatatagagaatcttatcgcactcactcctaatcaacattttatttacgcccaccctaataatcaaacccgcttgattgataaagattttcaatatatctgcttattagctaaaacgaccacaattcttaatgacactcaaggcgtatatgattggaatgattatattgttgtgttgaatatgggcctcaaaacaactatcttttctcaagtcaagaacgaatgggaattattaaaagtaatagatgctttttattttgattttaacaagagcaaagatccaagttggtcatacttgctagataaaaacgatttaagagctttcaagctaaaattttaataagttttattgaaactggctataaaaacccgcttgacttatcttatcctttt

SEQ ID NO: 30 - protein, 419 aa, Helicobacter pylori
MKEQSMIDFLKLRDYDIRKTQNARWIDQKCTPDVLSLVADCILEFTQCNIGKSFSIRDIWDSPYTNENVKMIFSKPDLNSDFSMHEYDKFFSQPIKLLAYSGILFETKTGNRNIYTIQNIELLEYLMQRETNALKFLILYIQKVLMDSGIYPLFDNFLQKQDTESFKQLKDGFTHFTINNTAINNATECFRIFTKIINPLAFYYGKKGTRKGYLSNTIITKDELNYNRINWRDIGKDKNTTRQEYDLINSKRIANSNYLISKAKKVVKRYNDRFNNSLSEVKQEKEESQATQIHHIFPIQDFPIIANYIENLIALTPNQHFIYAHPNNQTRLIDKDFQYICLLAKTTTILNDTQGVYDWNDYIVVLNMGLKTTIFSQVKNEWELLKVIDAFYFDFNKSKDPSWSYLLDKNDLRAFKLKF

SEQ ID NO: 31 - DNA, 763 bp, Helicobacter pylori
  CDS (53)...(709)
aaataagctaatctttgctaaaatgagatttaaaattatttaaggaagatgaatgctttttgcgatgattggttcaggggggtttatcgctcccaagcacttgcaagcgattagagatacagggcattttttggattgctcttttgatattcatgatagcgtgggggttttagatgagtatttcgcgcaatcagagttttttacgaatattgaagattttgaaaagcatttagagcaatctaaggatatgggtaaagaaatcaactatttgagtgtttgcacgcctacgcacacgcattttgatcacatccgtttcgggttaagaaacggcatgcatgtgatttgtgaaaaacccttagttttagaccctggcgaaatacaagaattgaaagatttagaggtgaaacaccaaaaaagggtgtttagtcttttacccttgcgcttgcattgcgacacgctggctttgaaagaaaaaattaagagcgaattagacaaaaaccctagcaaggtgtttgacatcacgctcacttatatcagcgttcaagggaaatggtatttttcttcatggcgagcggatgtgaataggagcggagggttagccactcaaatgggggtgaatatttttgacactttaatctatttgtttggaagcgttaaagacaaggttatcaataaagaagagcctgattgcgtagggggatactctttttagagcatgccaaaataagatggtttttttccatcaatccagaacacatgggag

SEQ ID NO: 32 - protein, 219 aa, Helicobacter pylori
MLFAMIGSGGFIAPKHLQAIRDTGHFLDCSFDIHDSVGVLDEYFAQSEFFTNIEDFEKHLEQSKDMGKEINYLSVCTPTHTHFDHIRFGLRNGMHVICEKPLVLDPGEIQELKDLEVKHQKRVFSLLPLRLHCDTLALKEKIKSELDKNPSKVFDITLTYISVQGKWYFSSWRADVNRSGGLATQMGVNIFDTLIYLFGSVKDKVINKEEPDCVGGYSF

SEQ ID NO: 33 - DNA, 1465 bp, Helicobacter pylori
  CDS (51)...(1412)
  misc_feature 976: n = A,T,C or G
gacagaagctgaatttgaggtgcgcttatagcttgtaaaagggggtgtttatgtttttattaaggcatttgacttcagcgtgcgtgtttttggcgtctaaatgtttgccggactcctttgtcttggtcgctcttttatcgtttgtcgtgtttgttcttgtttattgcttgacagggcaagacgctttttctgtcatttctagttgggggaatggcgcttggacgcttttaggtttttctatgcaaatggcccttattttggtgttgggtcaggctctggctaacgctaaattagtccaaaagcttttaaaatatctagcgtctttacctaaagggtattatacggctttatggttggttacttttttatcgttaatcgctaattggatcaactggggttttggcttggtgattagtgcgatttttgcaaaagagatcgccaaaaatgttaagggggtggattacaggctgctcattgctagcgcttattcgggttttgtcatctggcatgggggtttatcaggctctatccctttaagcgttgccacccaaaatgaaaatctatccaaaataagcgctggggtgattgaaaaagctatccctatcagtcagacgattttttcttcttataatttaatcattatagggatcattcttgtagggttaccctttttaatggcaatgatccaccctaaaaaagaagaaatcgttgagattgattcaaagcttttaaaagacgagtacaaagagattgaactcattagccaccaacaagacaaaacgatcgcgcattttttggaaaacagcgctttgctttcttatcttttggtttttttgggttttgggtatcttggtgtttatttttttaaagggggagggattagtttaaacattgtcaatacgattttcctttttttagggattttactgcataaaacccctttagcttatgtgaaagcgatcgatcgttccgctangagcgtggctgggattttattgcaattccctttttacgctgggattatggggatgatggcaagccatagcgtggggggtcattctttagcgcaaatgctttctttagctttcacgcacatcgctaatgaaaaaactttcgtgctcatgacttttttgagcgcagggattgtcaatatttttattccgtctggcggagggcaatgggcgattcaagctcctatcatgcttccggctgggcaaagcttaggggtggatccgggagtggtttctatggctatcgcttggggagatgcttggacgaatatgatacagcctttttgggctttgcccgctttagccattgcgggtttgggcgctaaagatattatgggctattgcgttttgactttaatttttgtaggcttagtcgtgtgtggggtgttttattttttagtgtgagttttttatgcctaaaaccatgctcttttcaatggggtaaggttttctct

SEQ ID NO: 34 - protein, 454 aa, Helicobacter pylori
  VARIANT 309: Xaa = Any Amino Acid
MFLLRHLTSACVFLASKCLPDSFVLVALLSFVVFVLVYCLTGQDAFSVISSWGNGAWTLLGFSMQMALILVLGQALANAKLVQKLLKYLASLPKGYYTALWLVTFLSLIANWINWGFGLVISAIFAKEIAKNVKGVDYRLLIASAYSGFVIWHGGLSGSIPLSVATQNENLSKISAGVIEKAIPISQTIFSSYNLIIIGIILVGLPFLMAMIHPKKEEIVEIDSKLLKDEYKEIELISHQQDKTIAHFLENSALLSYLLVFLGFGYLGVYFFKGGGISLNIVNTIFLFLGILLHKTPLAYVKAIDRSAXSVAGILLQFPFYAGIMGMMASHSVGGHSLAQMLSLAFTHIANEKTFVLMTFLSAGIVNIFIPSGGGQWAIQAPIMLPAGQSLGVDPGVVSMAIAWGDAWTNMIQPFWALPALAIAGLGAKDIMGYCVLTLIFVGLVVCGVFYFLV

SEQ ID NO: 35 - DNA, 1114 bp, Helicobacter pylori
  CDS (51)...(1061)
tatcactatactttcaataaaataaggggttttttttgactaaaaaattcatgtcttggatggtggttattggggctttaatttgcatgcttttaggggtgtttatcttcttcactagcatgtcggttaaaaaatttttaagcgcttatcttaacgcttatttggatcaacgcccccatattaagggcatggggattgcaggcactccctttgaatgcgaagggttttttaaaatcgcatgcgtttctaaagagctcagttttttagactctcaaaactcccctattgtgaattttaaaaatttgagtattaagctccgttctttagataaaagctctcttactctttctgtccattctcaaatcaaatcccctattttagaacaagatatgcagcaaaaaatcagccaaatccccctaaaagacttgaatgccttattagaaaaaatgaaacccacgcgcttgaattgctctttaacattcaacgctctagatgaaaaaaccttaaacgacaacttaaaatgcgatttgactaatgcggaaaatatccttgcttacactttttttcaagagggtttaatggaggctcaagaaaatctatcccttaaaaatatttttaaaaccttgagttctaaagacgctaaagccatagaagagttgcaagacaaactgcgtttttcagcgccaaagttgggcgtttctatccaagcgcaccatcttaaaaaccttttggaagccttttatcaccaaaataaagagagtttgggctttttttccccttattttagtttgcgatctcaaacccctagcgtctcttatgaaagcgcgttagcttctttagaaaactattttatggctttgttccaatcccattttaaagacgataccgcactccaacagaattttaaaggattgttgcaagcctttgtttctatggctaaagacaaacgatcccaaatcgctcttaacgcccaagctaaagacaacgccaagctaacttttaacgccttgttagaaagccttagcgtgaatttctttcaatcttacaaaataagccatgagtgatttcgaagtcccccccaaagctaaagggtttaaacgcctttttaaagccc

SEQ ID NO: 36 - protein, 337 aa, Helicobacter pylori
MSWMVVIGALICMLLGVFIFFTSMSVKKFLSAYLNAYLDQRPHIKGMGIAGTPFECEGFFKIACVSKELSFLDSQNSPIVNFKNLSIKLRSLDKSSLTLSVHSQIKSPILEQDMQQKISQIPLKDLNALLEKMKPTRLNCSLTFNALDEKTLNDNLKCDLTNAENILAYTFFQEGLMEAQENLSLKNIFKTLSSKDAKAIEELQDKLRFSAPKLGVSIQAHHLKNLLEAFYHQNKESLGFFSPYFSLRSQTPSVSYESALASLENYFMALFQSHFKDDTALQQNFKGLLQAFVSMAKDKRSQIALNAQAKDNAKLTFNALLESLSVNFFQSYKISHE

SEQ ID NO: 37 - DNA, 445 bp, Helicobacter pylori
  CDS (51)...(392)
aaaatgagggtgtttcaattcaagccatgagtaagttatatgagtaagccatgaatatcaaaacccattcttcaaatgaaaaagaacgctttgtgcgcatagaagaggacgaaaagaaaggattatttgctggaactgcaaatgaaaattcgcacggcctttctttaatggctttaataggggtattggtttttgggggcgcgtttttagctctgttagcgcctaaaatctatttaagcaataatatctattatattagccgtaaaatcaacaccctagaagatcaaaaacgcctgcttttagaagagcaacaaatcctaaaaaacgaattagaaaaagagcgttttaaatactacatagaaaatagtgaaaatattggcgatattgcgttttaagtgaaaaaccccctatccccttaagagagcttaattaatggtcaatcatt

SEQ ID NO: 38 - protein, 114 aa, Helicobacter pylori
MNIKTHSSNEKERFVRIEEDEKKGLFAGTANENSHGLSLMALIGVLVFGGAFLALLAPKIYLSNNIYYISRKINTLEDQKRLLLEEQQILKNELEKERFKYYIENSENIGDIAF

SEQ ID NO: 39 - DNA, 218 bp, Helicobacter pylori
  CDS (52)...(165)
aaggtttttagcgaaataagcccccacgccaaacacgcccatgctcattagcacaatatcgcacataaagcacaaagcgcaaatcaaaaacacataattcctagccatccccctttccacaataaacaaggattgcgcccccaccgccgcacacaaagaaatcgctaaaccaaaaccttctataaaaaccacaaacatcttgcttaatcctttcactc

SEQ ID NO: 40 - protein, 38 aa, Helicobacter pylori
HNIAHKAQSANQKHIIPSHPPFHNKQGLRPHRRTQRNR

SEQ ID NO: 41 - DNA, 967 bp, Helicobacter pylori
  CDS (51)...(914)
  misc_feature 43: n = A,T,C or G
tagtcaagtcgctattactgcaagcccggtgagcgcagcggtnggtgtttatgagcggcattttagagcctttaggagcaaattacttgacccttttaatggtttggatccctacgacttttttagcatgcatgctcacggcatttattatgggttttactgatttgaaattagacagcgatccgcattatttagagcgcttgaaagcgggcaaaatctcgccccctaaaatcaaagaagaaaaagaaacctcaaaaaacgcgaaattatcgttatggatttttatcggtggggttgtagcgatcgttttttatgcgagcgcgatttctaaaaatatcgcttttgttagcccggtggttttaggcagagatcacgcgattgtgtctttcatgctaagcgtggcgactttaattgtgcttttttgcaaaattaacgctaatgaaatcgctcattcaagcgtgtttaaatccggcatgcaagcgtgcgtgtgcgtgttgggcgtggcgtggttgggcgatacttttgtgagcaatcatatagatgagatcaaacgatacgcttcttttttgatcgcagattatccgtttttattagccgtagcgctctttttggcttccatgcttttgtattcgcaagccgccacctctaaagcgctcatcccaagcgtgatcacagccttaggcattagcgctaatcatacggagcatttgtatattatcgtggcttcgtttgcgagcgtttcggcgttgtttgtgttacccacttaccccactttactaggagcgatcgctatggataacaccggcaccactaaaatgggccgttatgtgtttgatcatgcgtttttgatccctggggttttagtcgtgtctttgagcgtagcgttagggtttgttgtcgcgccgttagttttgtagattttatcaccaacgataaaaagcttggcgttgcgatttttctaaacccc

SEQ ID NO: 42 - protein, 288 aa, Helicobacter pylori
MSGILEPLGANYLTLLMVWIPTTFLACMLTAFIMGFTDLKLDSDPHYLERLKAGKISPPKIKEEKETSKNAKLSLWIFIGGVVAIVFYASAISKNIAFVSPVVLGRDHAIVSFMLSVATLIVLFCKINANEIAHSSVFKSGMQACVCVLGVAWLGDTFVSNHIDEIKRYASFLIADYPFLLAVALFLASMLLYSQAATSKALIPSVITALGISANHTEHLYIIVASFASVSALFVLPTYPTLLGAIAMDNTGTTKMGRYVFDHAFLIPGVLVVSLSVALGFVVAPLVL

SEQ ID NO: 43 - DNA, 1237 bp, Helicobacter pylori
  CDS (51)...(1184)
aaaaattctatcatttttgcgcggtattttcattttaacaaggagcaaaaatgctagaaaatagctctatatggagcaatcctgcctttgtggctatcatttgcatgtgcgttcttagccttttaaggctcaatgtcatgctttctatgattagtgcgactctcatagcaggacttatgggagggcttgggatcacggagagttttaatgcaatgatagacggcatgaaaggcaatttgaacatcgctttaagctacatccttttaggggctttagcggtagcgatcgctaaaagcaatctcattaaagtcgctttgagtaaattaataggtttaatggattacaagcgatccactttttgctttttgatcgctttcatcgcatgcttttcgcaaaatttagtgccggtgcatatcgcttttatccctattttaatcccccctcttttgcatttaatgaaccggctagaattggatagaagagcggtcgcttgcgctttaacctttggcttgcaagccccctacttggtgcttcctgtagggtttggcttgatttttcaaaccaccattttagagcaattaaaagctaatggcgttagcaccaccatagcgcaaatcacaggagtgatgtggatagcggggttagcgatggtcgttggactgcttgttgctgtattaacgctatacaaaaaacccaggcactacaaagagaaatcttttaatatagaaaattacgcctcgcttcaattaaactaccatgactacttgacttttatagggattgtcgtagcgtttgtgatccaattagccaccgattcgatgcccttagccgcctttttagcgttagcgatcatcttattaggccgtggcattaagtttaaagaaacagactcgcttatggatgatagcgtgaaaatgatggcgtttatcgcttttgtgatgttggtggctagcgggtttggagaagtgttgcaaaaagtgcatgcgatagagggcttagtgaatgcgattacaagcgtagtccaagggaagcttttaggggcttttttaatgcttgttgtagggctttttatcactatggggatagggacttcttttggcactattcctatcatcgctgtgttttatgtccctttatgcgcgaaattaggttttagcgtagaatctacgattttactcatcgcatagccgcagctttaggcgatgcaggctcaccggctagcgatagcaccatgggg

SEQ ID NO: 44 - protein, 378 aa, Helicobacter pylori
MLENSSIWSNPAFVAIICMCVLSLLRLNVMLSMISATLIAGLMGGLGITESFNAMIDGMKGNLNIALSYILLGALAVAIAKSNLIKVALSKLIGLMDYKRSTFCFLIAFIACFSQNLVPVHIAFIPILIPPLLHLMNRLELDRRAVACALTFGLQAPYLVLPVGFGLIFQTTILEQLKANGVSTTIAQITGVMWIAGLAMVVGLLVAVLTLYKKPRHYKEKSFNIENYASLQLNYHDYLTFIGIVVAFVIQLATDSMPLAAFLALAIILLGRGIKFKETDSLMDDSVKMMAFIAFVMLVASGFGEVLQKVHAIEGLVNAITSVVQGKLLGAFLMLVVGLFITMGIGTSFGTIPIIAVFYVPLCAKLGFSVESTILLIA

SEQ ID NO: 45 - DNA, 945 bp, Helicobacter pylori
  CDS (61)...(636)
ttagccactaccacaggcacagggtgttcttcatcaaatttgagagcgacggcgtaatgggtggggttagtaaccacgacattggctttagggatttcttgcatcattttattcgtggcgttttttagcatcatttggcggattttggctttgatttctgggttcccttcttgctgtttgtattcgtccttaacttcttgtttagtcatttttaaagagttggtgtattggcggcgtttgatcgctaaatctataaaagccaagacaaaaaataaaaataaaagcgaagaaatgagccataacgccttatttttaaaccacaacaactggccttgtaaattcaaaagagccgcatggtttaattcccctaaaaacaaagaaaagatgaaaaaccccagaaaaaaagctaaaaaaacttttaaggtgatcaaactcccatcaaggagcttttttaaagaaaaaaggtttttgacgccattgatagggttgattttagaaaatttaggctcaatgactttaggggcaaagagccagccaaattgcaagacattagataaaaacgccaccaccactaaaatgattaaaatcggtaaaagcaataaaaaagtgtctttagccagttggttaaacagctcttgaacgctttctttactgaaatctagggaaaaatctttcaacacatggcgatacatttcgctaaagccatccacccaccatataaaaaaaacaaaaatactaattagcccggccaataaccccaaaacccccaccacttccatgctcttaggcacattgccttcttctctggctttttggatttttttcgcgctagggagttcggttttttcttcttcagccattggccctcttttttaaaatttgaacggctaattcatagtcttttagggtgtttaggtttaaaaattcttcttctttgtcaaaatt

SEQ ID NO: 46 - protein, 192 aa, Helicobacter pylori
VGLVTTTLALGISCIILFVAFFSIIWRILALISGFPSCCLYSSLTSCLVIFKELVYWRRLIAKSIKAKTKNKNKSEEMSHNALFLNHNNWPCKFKRAAWFNSPKNKEKMKNPRKKAKKTFKVIKLPSRSFFKEKRFLTPLIGLILENLGSMTLGAKSQPNCKTLDKNATTTKMIKIGKSNKKVSLASWLNSS

SEQ ID NO: 47 - DNA, 851 bp, Helicobacter pylori
  CDS (49)...(783)
attgatagtttcttcagcaagaatgattaggcaatgattaggttgtagatgaatttttatcaaaaaatatacactcataaagtcgttttttcttcattgttttttttgttgtttttgttcaatgtggaaactttgttgctttcgcatttcagcgatgatttttcgcaattgttttttttgtttgaaaaccatgtttatgatttcattgtcaaattagattatttggggctaataggcgtttctttaatttatctgcttgtgcttattctaaagcctttcaccctcacgcgccaaaaatgcgcttgcgtagggatattatgcctttctttctacgcttggaattttcctgttaaagattctttaatggtgctttatcttttctattttgcgctgttagcgactttattgtggcgttttttaggggctagcatgaagcaatctttcttgccctctatgaatatttgcatcgtgtgggtttttgcttcttctttacagagttttaggtttttaagcgtgtctgattgcgtggatttttccctttttacactcgcgcttattttattgatactggttttaatctattgcaaacgcctttttgggttgtatgaatacgctaacacgctcattttgatcgtggggcttagcgtggtggtgctatgctctagcatgttcattcaaactaaagaatactatggcatgcgattgggtttttattttttaggcctgttagggtggcttttagaatatgtgcataacactttaaggcgtttggaacatcaaatttaaagctcaaataggaatagctaaagccttttgattgagtgtttttttagggcttaaaagcgggttta

SEQ ID NO: 48 - protein, 245 aa, Helicobacter pylori
MNFYQKIYTHKVVFSSLFFLLFLFNVETLLLSHFSDDFSQLFFLFENHVYDFIVKLDYLGLIGVSLIYLLVLILKPFTLTRQKCACVGILCLSFYAWNFPVKDSLMVLYLFYFALLATLLWRFLGASMKQSFLPSMNICIVWVFASSLQSFRFLSVSDCVDFSLFTLALILLILVLIYCKRLFGLYEYANTLILIVGLSVVVLCSSMFIQTKEYYGMRLGFYFLGLLGWLLEYVHNTLRRLEHQI

SEQ ID NO: 49 - DNA, 827 bp, Helicobacter pylori
  CDS (95)...(745)
ctttttacttttagttaagttgtaagaaactttagctaccatgcgatacaaaaaaggattttaagtgcgttttggtaaaattgattatttgaacatgctcccttttgatgtgtttatcaaatcctaccccaccccttgttatttcaaacaattcttacggcttaaaaaaacctacccctccaaactcaatgagagttttttattcaggcgtattgatgcggggtttatttcttctatcgccggctatccattcgctcttcattcccattctctaggcattgtcgcttataaggaagttttaagcgtgctggttgtggatacaaaaaacgcttttgataaagaaagcgcttcttcaaacgccctctctcaagcgctagggttaaagggcgaagtgttaatcggcaataaagcactgcagttttattattccaaccctaaaaaagattttatagatttagccgctctttggtatgaaaaaaaacgcttgccgtttgtttttgggcgtttgtgttattaccaaaacaaggatttttacaagcgcttgtctttagctttcaaacatcaaaaaacaaaaatcccttactacatccttaaagaagccgctttaaaaaccaacttaaaacgccaagatattttaaattacttgcaaaaaatttactacactttaggcaaaaaggagcaattaggtcttaaagcgttctatcgtgaattgttattcaaacgcattcaaaaacccaagcgtttttagtgattcgctgagaatgtaggcttaaaattcagaaagggtgtttttaagcaagattaggttacaatcacaagttttatta

SEQ ID NO: 50 - protein, 217 aa, Helicobacter pylori
MLPFDVFIKSYPTPCYFKQFLRLKKTYPSKLNESFLFRRIDAGFISSIAGYPFALHSHSLGIVAYKEVLSVLVVDTKNAFDKESASSNALSQALGLKGEVLIGNKALQFYYSNPKKDFIDLAALWYEKKRLPFVFGRLCYYQNKDFYKRLSLAFKHQKTKIPYYILKEAALKTNLKRQDILNYLQKIYYTLGKKEQLGLKAFYRELLFKRIQKPKRF

SEQ ID NO: 51 - DNA, 736 bp, Helicobacter pylori
  CDS (76)...(663)
gcaacaagaaattttagagaaaatgagacccaacgctcaaaaaattcaagcgggttaaacggctaaaaaggagagatgatgggatacattccttatgtaatagagaataccgatcgtggggagcgtagctatgatatttactcgcgccttttaaaggatcgcattgttttattgagcggtgaaattaatgacagcgtggcgtcttctatcgtggcccaactcttgtttttggaagctgaagaccctgaaaaagacattggtttgtatatcaattctcccggtggggtgataacaagcggtcttagtatttatgacaccatgaattttatccgccctgatgtttccacgatttgcatcggtcaagcggcttctatgggggcgtttttactgagctgtggggctaagggcaagcgcttttcgctaccccattcaaggattatgatccaccagcctttagggggggctcaagggcaagcgagcgatattgaaatcatttctaatgagattctcaggcttaaaggcttgatgaattctattctagctcaaaactcagggcagagtttggagcaaatcgctaaagacacggacagggatttttatatgagtgctaaagaagctaaagagtatggcttgattgataaagtgttacagaaaaacgtgaagtgattgcatggcgttattagagattatccattacccttctaaaatcttaagaacgatttctaaagaggtcgtt

SEQ ID NO: 52 - protein, 196 aa, Helicobacter pylori
MMGYIPYVIENTDRGERSYDIYSRLLKDRIVLLSGEINDSVASSIVAQLLFLEAEDPEKDIGLYINSPGGVITSGLSIYDTMNFIRPDVSTICIGQAASMGAFLLSCGAKGKRFSLPHSRIMIHQPLGGAQGQASDIEIISNEILRLKGLMNSILAQNSGQSLEQIAKDTDRDFYMSAKEAKEYGLIDKVLQKNVK

SEQ ID NO: 53 - DNA, 904 bp, Helicobacter pylori
  CDS (1)...(852)
cgcataaaaaaagaacgcttgaacaaactgcttaaaagggggtttttagcgttctttttgagcgtgtatttaagggctgatgatttggttacttacaccatcatcaaagaaaaagatctaggataccagcggtttttagccaagaagtgtttaaggggtaaaacccaccctccgtgttttactaagcctaaaaagcctaaaagaaaactttttaatatagacaaaagctcccactattatggcacaagcgtggtgcaaatgtcatggctacagagtagggaaaaatttgaaaaccattcaaaataccgagacattccttttgctgaagtcagtttgatttatggctataaacaattttttcctaaaaaagagcgctacggcttccgtttttatgtctctttggattacgcttatgggttttttcttaaaaataagggcgtgttgggcgatagtttgagggagagttcgcaaatccctaaaagctatagagaaaaattgcaaagaaaagagacttttattaacgctattttttatggcgcgggagctgactttttatacaaacgcgcttttggaacgctgattttagggatgaatttcgtgggagaaacctggttttatgaaacaaagatttttaaaaagtgggctaaagatcctttgagcgtttatcacccttacatgtttcaagtgatgttgaatgtggggtatcgttaccgcttttcaaggtataagaattgggcgatagaattgggtgcgcgcatcccttttttaaccaatgattattttaaaacccctttatacacccttcatttcaagcgcaatatttctgtctatctcacttcaacttatgacttttagttttttaaatttttgaaaactagaattaaaaccgctttttataaactgg

SEQ ID NO: 54 - protein, 284 aa, Helicobacter pylori
RIKKERLNKLLKRGFLAFFLSVYLRADDLVTYTIIKEKDLGYQRFLAKKCLRGKTHPPCFTKPKKPKRKLFNIDKSSHYYGTSVVQMSWLQSREKFENHSKYRDIPFAEVSLIYGYKQFFPKKERYGFRFYVSLDYAYGFFLKNKGVLGDSLRESSQIPKSYREKLQRKETFINAIFYGAGADFLYKRAFGTLILGMNFVGETWFYETKIFKKWAKDPLSVYHPYMFQVMLNVGYRYRFSRYKNWAIELGARIPFLTNDYFKTPLYTLHFKRNISVYLTSTYDF

SEQ ID NO: 55 - DNA, 1172 bp, Helicobacter pylori
  CDS (75)...(1106)
taatcgttattaaacatgctatatttcttttttctataaaactcaatattattgaataaaactagggagttagaatgatcttaaaacgagttactgaagctttagaagcgtataaaaatggcgaaatgctcattgttatggacgatgaagacagagaaaatgagggggatttggttttagctgggattttttctacccctgagaaaatcaatttcatggccacgcatgctagggggttgatttgcgtgtctttgaccaaagatttagcgaaaaaatttgaattaccccctatggttagcgtgaatgattctaaccatgagaccgctttcacggtttccattgacgctaaagaagccagaaccgggatttctgcttttgaaaggcatttaacgattgaattattgtgtaaagacaccaccaaaccgagcgattttgtgcgcccggggcatattttccctttgatcgccaaagacgggggcgtgttagcgcgcacgggccatactgaagcgagcgtggatttgtgcaaattagctggattaaagcccgtgagcgtgatttgtgaaatcatgaaagaagatggctctatggcgagaaggggggataaatttttgagcgatttcgccctcaaacataaccttaaaactctctatgtctctgatttgattagctatcgtttggaaaatgaaagtttgctgaaaatgttttgtcaagaagaaagggaatttttaaaacaccaaacgcaatgctacacttttttagatcaccagcaaaaaaaccattacgcttttaagtttaaaggcgcaaaaacccatgatttagcccctttagtgcgtttccaccctatcaaagaggattttgattttttaacgactgatgcgtttgaagtgttttttaaagcgttagaatatttaaagcacgaagggggctatttgatctttatgaacacccattctaaagaaaacaatgtcgttaaagattttgggatcggggcgttggtgttaaaaaatttggggataaaggatttcaggctcttaagctcttgtgaagacaggcagtataaggctttgagcgggtttgggcttaagcttgtagaaacgattagcctttaagaggctcgttaagttttattgaatgtgttgtaatgtttttaaggtataataaactctttttaa

SEQ ID NO: 56 - protein, 344 aa, Helicobacter pylori
MILKRVTEALEAYKNGEMLIVMDDEDRENEGDLVLAGIFSTPEKINFMATHARGLICVSLTKDLAKKFELPPMVSVNDSNHETAFTVSIDAKEARTGISAFERHLTIELLCKDTTKPSDFVRPGHIFPLIAKDGGVLARTGHTEASVDLCKLAGLKPVSVICEIMKEDGSMARRGDKFLSDFALKHNLKTLYVSDLISYRLENESLLKMFCQEEREFLKHQTQCYTFLDHQQKNHYAFKFKGAKTHDLAPLVRFHPIKEDFDFLTTDAFEVFFKALEYLKHEGGYLIFMNTHSKENNVVKDFGIGALVLKNLGIKDFRLLSSCEDRQYKALSGFGLKLVETISL

SEQ ID NO: 57 - DNA, 394 bp, Helicobacter pylori
  CDS (51)...(341)
gatttatccttgcataaaacaatctcgcttggcgataaaaaacgctctaaaaacttcattttaaagcgtttcacgcacttttctatcctagcaatagagacaatatctatgccaatcatttaaaattattggataatgaaatcagtgaaaaagacatttttaataaagccatcaatcaaaaacgaattcaaatggctcttaatctcatctttaagcttgtttttgcctttgttagtaaccacttcttccacgcttttagacgacagaatctctataatcgtgtctttaatcgctgtgtctttaaccttgacttcattcaaaagcttttcattactcaattctaacgaaatagaagccttaaggtagcgtctgccattttgagagaccagattca

SEQ ID NO: 58 - protein, 97 aa, Helicobacter pylori
KLHFKAFHALFYPSNRDNIYANHLKLLDNEISEKDIFNKAINQKRIQMALNLIFKLVFAFVSNHFFHAFRRQNLYNRVFNRCVFNLDFIQKLFITQF

SEQ ID NO: 59 - DNA, 360 bp, Helicobacter pylori
  CDS (82)...(270)
  misc_feature 331: n = A,T,C or G
acttaaaggcataaaaaccttaagctttttgagtttcaaaagggtttcaagctttttataagactttttttgaatgagtaaggagaaaatattttgttccataaactgatcttaacatgctttttagcgcttgtagcaataaccattcaagcttgcggttataaagcccctccattcaatgaaaaacccgctaaaaaaacttcaaacagctctaattcttctatgcaaacgcccaccaacagcaccacgccagaatttttaaatcagccttaaaatcactgctcttgtttaagggctttgatttctagggtttttgtggctaacttttgansttcgctttcatcatgcgttaccataatg

SEQ ID NO: 60 - protein, 63 aa, Helicobacter pylori
GENILFHKLILTCFLALVAITIQACGYKAPPFNEKPAKKTSNSSNSSMQTPTNSTTPEFLNQP

SEQ ID NO: 61 - DNA, 445 bp, Helicobacter pylori
  CDS (51)...(392)
atttacaaagcgtgttggatacccccaagatgattcgtttggaaaattgaatgcgctttttgaacaacaaacatagagaaaagggcttaaaggctgaagaagaagcttgcggatttttaaaatcgttaggttttgaaatggtggagaggaactttttttcacaatttggcgaaattgatattatcgctttgaaaaaaggggttttgcatttcattgaagtcaaaagcggggaaaattttgatcccatttatgcgatcacgccgagcaaattaaaaaagatgattaaaacgatccgctgttatttgtcccaaaaagatcccaatagcgatttttgcatagacgctcttattgtgaaaaatggtaaatttgagcttttagaaaatatcactttttagatttttacagaaagtaaatgcgatttcattaacattcttaagctaatata

SEQ ID NO: 62 - protein, 114 aa, Helicobacter pylori
MRFLNNKHREKGLKAEEEACGFLKSLGFEMVERNFFSQFGEIDIIALKKGVLHFIEVKSGENFDPIYAITPSKLKKMIKTIRCYLSQKDPNSDFCIDALIVKNGKFELLENITF

SEQ ID NO: 63 - DNA, 831 bp, Helicobacter pylori
  CDS (86)...(763)
cgttaaaaagcttggtttaatgagtttttaaaacttaattgctacaattaaggaaattttcaataaggcttagagaaactttttcatggaacacagagtatttactattgctaatttttttagctccaatcatgattttatcaccgggttttttgtcgttttgacagcggttttgatgtttttaatctcgcttggcgcgtcgcgcaaaatgcagatggtacctatgggtttgcagaatgtgtatgagagcatcattagcgcgattttgagcgtggctaaggatattataggcgaagaattagcccgcaaatacttccccctagctggcacgatcgctttgtatgtctttttttctaacatgataggcatcattcctggctttgaatcccctacggctagctggagctttacgctggttttagcgctgattgtgtttttttattaccattttgaaggcattagagtgcagggcttttttaagtatttcgctcattttgcaggtcctgtgaaatggctcgcccctttcatgttccctattgagatcatctcgcatttttctaggatcgtgtctttatcgtttcgtttgtttgggaatatcaagggcgatgacatgttcttgctcatcatgcttttattagtgccttgggcggttcctgtagcgccttttatggtgttgtttttcatggggattttacaagcttttgtttttatgatcctcacttatgtgtatttggcaggggctgttttaaccgatgaagggcattaagcaataacattcttgtttggctttaatattgttttttaaaactttgttttatggtaaagctttta

SEQ ID NO: 64 - protein, 226 aa, Helicobacter pylori
MEHRVFTIANFFSSNHDFITGFFVVLTAVLMFLISLGASRKMQMVPMGLQNVYESIISAILSVAKDIIGEELARKYFPLAGTIALYVFFSNMIGIIPGFESPTASWSFTLVLALIVFFYYHFEGIRVQGFFKYFAHFAGPVKWLAPFMFPIEIISHFSRIVSLSFRLFGNIKGDDMFLLIMLLLVPWAVPVAPFMVLFFMGILQAFVFMILTYVYLAGAVLTDEGH

SEQ ID NO: 65 - DNA, 787 bp, Helicobacter pylori
  CDS (51)...(734)
agccataataacaaccaatggctagagcctgatgatttgttgaaattattatgaattttttagaagatttgttttaccccttaagattgttagaaaacaagcgtgttttattgctcgtgagcggttctattgcagcgtataaatccctagaattagtgcgcttgttgtttaaaagcggggctagtatccaagtggtgatgagtaagggtgcgaaaaaattcatcaaacccttaagttttgaagctttgagccaccataaagtcttgcatgatcgtaatgaaaaatggtattacaaccaccaaaacgccttacaccataaccacatcgcatgcgctgctaatgctgatttgctcatctttgcccctttaagcactaacagcttgtctaaaatcgctcacgctttagcggataatatcgtaagcgcgacttttttagcttgcgcttcccctaaaatcctagcccctagcatgaacactaacatgctcaattcccctatcactcaaagtaatttaaaacgcttgaaagattccaaccacattattttagacaccaaaaacgcccttttagcatgcgacactaaaggcgatggggcgatggctgagcctttagaaatcctttttaaagccgctcaaacgctcctaaaagacgcttattttgaaaacagagaagtcatagtcatgggcggcgcgagtatagaaaagattgacagcgttcgaacgattagcaatactttctagcgggattcaagcgagcgctttagctttggcgttatattttaagggagcca

SEQ ID NO: 66 - protein, 228 aa, Helicobacter pylori
MNFLEDLFYPLRLLENKRVLLLVSGSIAAYKSLELVRLLFKSGASIQVVMSKGAKKFIKPLSFEALSHHKVLHDRNEKWYYNHQNALHHNHIACAANADLLIFAPLSTNSLSKIAHALADNIVSATFLACASPKILAPSMNTNMLNSPITQSNLKRLKDSNHIILDTKNALLACDTKGDGAMAEPLEILFKAAQTLLKDAYFENREVIVMGGASIEKIDSVRTISNTF

SEQ ID NO: 67 - DNA, 1078 bp, Helicobacter pylori
  CDS (71)...(1009)
tcccaagccctaaaggcgcttcaatcattgattttaaaggcagttatgaagagtatttggcgagcaaaaaatgaaaccgcaagacattgaaatcgttcaaagcgttttagagattacaggaccgattaagcctactgaagtgtatgataaagccaaagagctttttgaaaaaggtgagattacaaacatgtttgattgtgggggcaaaaccccgcaccagagcgttagttcttatatttatacagccttaaacaagggcgaagaactgccttttaaaaaagtgcaagaaaacccaaccttaatcgctttaaaagacgcggctaaagagctaggtttagacgctcaaaaaataagcgctccaagctctaaaatcgcgcatgaaagggatttgcacccctttttaacctacatggctattaataacgaaaatttgaaatgctacacgaaaaccatttttcatgaagagagttcaaaatcaataaaaggcatggacaggtggctttatccggacatggtgggggttaggtttttgcacgctgaattatctaatgaaaatttaatcgctttttctaagaaatttgacactttacccattaaactggtgagctttgaattgaaaaaagaaatcagcgtgcataattgcagggagtgttactttcaagcgatttccaacagctcgtgggctaatgaagggtatttagtgggccgtcatattgatacgcacaatcctcaactcatggatttgttgaagcgtttgcatgcgagttttgggattggcgtgattgatttaagaactaatgaggataaaagcgctattttattgaacgctaaatacaaagaaaagattgattacaccgtggcttcagagcttagcgcgaaaaatgaaaaattcagcggttttttaaagagcgttgtggattatgacccaaaccacccacaacgctataaagatgaatttgatgaggttaaaaagaaagaggagttataccctaacccatcgctttctttttaaaaatgagattttaaaaaacgctttaagtgtttttgtaaaaaatagcaaagagcttgattttaatca

SEQ ID NO: 68 - protein, 313 aa, Helicobacter pylori
MKPQDIEIVQSVLEITGPIKPTEVYDKAKELFEKGEITNMFDCGGKTPHQSVSSYIYTALNKGEELPFKKVQENPTLIALKDAAKELGLDAQKISAPSSKIAHERDLHPFLTYMAINNENLKCYTKTIFHEESSKSIKGMDRWLYPDMVGVRFLHAELSNENLIAFSKKFDTLPIKLVSFELKKEISVHNCRECYFQAISNSSWANEGYLVGRHIDTHNPQLMDLLKRLHASFGIGVIDLRTNEDKSAILLNAKYKEKIDYTVASELSAKNEKFSGFLKSVVDYDPNHPQRYKDEFDEVKKKEELYPNPSLSF

SEQ ID NO: 69 - DNA, 444 bp, Helicobacter pylori
  CDS (112)...(375)
aactcgccttaggcgcgatggcgtttaaggaagtcaagctttttgaatttggcgagcaattaagggattttgtactatattgaagatgtgatccaagcgagcgtgaaagcgatgaaggctcaaaaaagcggggtttataatgtgggttattcccaagccagaagttataatgaaatcgttagcattttaaaagagcatttaggggattttaaagtgagttatatcaaaaacccttatgctttcttccaaaagcacacccaagcacacattgagcctgctattttggatttggattacacccctttatacgatttggaaagcggcattaaagattatttgccccatatccatgcgatttttaaaggacagtgcgcatgaaaaaaatcttagtcataggcgatctgatcgctgattattatttgtgggggaagagcgaacggcttt

SEQ ID NO: 70 - protein, 88 aa, Helicobacter pylori
MKAQKSGVYNVGYSQARSYNEIVSILKEHLGDFKVSYIKNPYAFFQKHTQAHIEPAILDLDYTPLYDLESGIKDYLPHIHAIFKGQCA

SEQ ID NO: 71 - DNA, 822 bp, Helicobacter pylori
  CDS (153)...(728)
cagcatgccgttgtttttaatggggatttttttaagcaaaatttccgtttcttacaggaaatttttcaatcttttgtctaaaattttaatgggggtttttgggctttatatcctttatatggggatcatgctcattaaccacaaaatgcctcatgccatgcatcatcaaaacaacaccactcagcatgatcataaaggagtgcattcgcatgaacactaacaaagccctttttttggacagagacggcattatcaatattgataaaggctatgtgagtcaaaaagaagattttgagtttcaaaaagggatttttgaattgctaaagcatgcgaaatctttaggctacaaactgcttttaatcaccaaccaatctgggatcaaccgaggctattacacccttaaagattttgaacaactcacccaatacctccaagaaagcttgttcaaagaattaggttttaatctggatggcatctatttttgcaggcacgccccagaagaaaattgcgcttgcaggaagccaaagccttctttgattttgcaagctgctaaagagcatcaaatttgcttggagcaatcttttatgataggcgataaagagagcgacatgttagccggcttgaacgctaaagttaaaaataaccttttgctcattcaaaaccctttaaaaactcctcattcttggatacaatgtaaagattttaaagagatgatagatctaatcaaataaggacaagaatgcgttatattgatgatgaattagaaaatcaaacgattttaatcaccggtggggctggctttgtaggcagtaatctagcctt

SEQ ID NO: 72 - protein, 192 aa, Helicobacter pylori
MPCIIKTTPLSMIIKECIRMNTNKALFLDRDGIINIDKGYVSQKEDFEFQKGIFELLKHAKSLGYKLLLITNQSGINRGYYTLKDFEQLTQYLQESLFKELGFNLDGIYFCRHAPEENCACRKPKPSLILQAAKEHQICLEQSFMIGDKESDMLAGLNAKVKNNLLLIQNPLKTPHSWIQCKDFKEMIDLIK

SEQ ID NO: 73 - DNA, 831 bp, Helicobacter pylori
  CDS (88)...(756)
aacaaagagcgagagagcatcaagaaagagatgaaaaagagcttgaagaaagaagaaaagctttagaaatgaataagaagtaggcctatgccagctaggcaatcttttacagatttgaaaaacctggttttgtgcgatataggcaacacgcgtatccattttgcacaaaactatcagctcttttcaagcgctaaagaagatttaaagcgtttgggtattcaaaaggaaattttttacattagcgtgaatgaagaaaatgaaaaagcccttttgaattgttaccctaacgctaaaaatattgcagggttttttcatttagaaaccgactatgtagggcttgggatagaccggcaaatggcgtgtctggcggtaaataatggcgtggtggtggatgccgggagtgcgattacgatagatttaatcaaagagggcaagcatttaggagggtgtattttacccggtttagcccaatatattcatgcgtataaaaaaagcgctaaaattttagagcaacctttcaaggccttagattctttagaagttttacctaaaagcactagagacgctgtgaattacggcatggttttgagcgtcattgcttgtatccagcatttagccaaaaatcaaaaaatctatctttgtgggggcgatgcgaagtatttgagcgcgtttttaccccattctgtttgcaaggagcgtttggtttttgacgggatggaaatcgctcttaaaaaagcagggatactagaatgcaaatgatgcacaatttgagttttttgggcatgtttttagccgctttgagcatgtctttagggcattgtgtgggcatgt

SEQ ID NO: 74 - protein, 223 aa, Helicobacter pylori
MPARQSFTDLKNLVLCDIGNTRIHFAQNYQLFSSAKEDLKRLGIQKEIFYISVNEENEKALLNCYPNAKNIAGFFHLETDYVGLGIDRQMACLAVNNGVVVDAGSAITIDLIKEGKHLGGCILPGLAQYIHAYKKSAKILEQPFKALDSLEVLPKSTRDAVNYGMVLSVIACIQHLAKNQKIYLCGGDAKYLSAFLPHSVCKERLVFDGMEIALKKAGILECK

SEQ ID NO: 75 - DNA, 1780 bp, Helicobacter pylori
  CDS (195)...(1709)
ttgtttttaatctttcttattttcattaattgttacgaatagaaatacttaagggggtttttcattcttaaaaaaaggattttttaaggaaattgaatcttgttagtctttgtataacaaattatgtgataatcaccacaagtaatcggcttagtgtcatattacgaagatttaagatcataaaaggaaaaaagatggttaataaagatgtgaaacaaaccactgcttttggcgctcccgtttgggatgacaacaatgtgattacggccggccctagaggtcctgttttattacaaagcacttggtttttggaaaagttagcggcgtttgacagagaaagaatccctgaaagggtggtgcatgctaaaggaagcggagcttatggcactttcactgtgactaaagacatcactaaatacactaaagcgaaaattttctctaaagtgggcaaaaaaaccgaatgcttcttcagattttctactgtggctggtgaaagaggcagtgcggatgcggtgagagaccctagaggttttgcgatgaagtattacactgaagaaggtaactgggatttagtggggaacaacacgcctgttttctttatccgtgatgcgatcaaattccctgatttcatccacactcaaaaacgagatcctcaaaccaatttgcctaaccatgacatggtatgggatttttggagtaatgttcctgaaagcttataccaagtaacatgggttatgagcgataggggtattcctaaatctttccgccacatggatggttttggcagccacactttcagtcttatcaacgcgaaaggcgaacgcttttgggtgaaattccactttcacaccatgcaaggcgttaagcatttgactaacgaagaagccgcagaagttaggaagtatgatccggattccaatcaaagggatttattcaatgcgatcgctagaggggatttcccaaaatggaaattaagcattcaagtgatgccagaagaagatgctaagaagtatcgattccatccgtttgatgtaactaaaatttggtatctccaagattatccattgatggaagtgggcattgtggagttgaataaaaatcctgaaaactatttcgcagaagtggaacaagcggcattcagtccggctaatgtcgttcctggaattggctatagccctgataggatgttacaagggcgcttgttctcttatggagacacacaccgctaccgcttaggcgttaattatcctcaaataccggttaataaaccaagatgcccattccactcttctagcagagatggttacatgcaaaacggatactacggctctttacaaaactatacgcctagctcattgcctggctataaagaagataagagcgcgagagatcctaagttcaacttagctcatattgagaaagagtttgaagtgtggaattgggattacagagctgatgatagcgattactacacccaaccaggtgattactaccgctcattgccagctgatgaaaaagaaaggttgcatgacactattggagagtctttagctcatgttacccataaggaaattgtggataaacaattggagcatttcaagaaagctgaccccaaatacgctgagggagttaaaaaagctcttgaaaaacaccaaaaaatgatgaaagacatgcatggaaaagacatgcaccacacaaaaaagaaaaagtaacccttttctttaagcgttcttattttttaggaacgctttgtctttcaaaatttaggtttttggatact

SEQ ID NO: 76 - protein, 505 aa, Helicobacter pylori
MVNKDVKQTTAFGAPVWDDNNVITAGPRGPVLLQSTWFLEKLAAFDRERIPERVVHAKGSGAYGTFTVTKDITKYTKAKIFSKVGKKTECFFRFSTVAGERGSADAVRDPRGFAMKYYTEEGNWDLVGNNTPVFFIRDAIKFPDFIHTQKRDPQTNLPNHDMVWDFWSNVPESLYQVTWVMSDRGIPKSFRHMDGFGSHTFSLINAKGERFWVKFHFHTMQGVKHLTNEEAAEVRKYDPDSNQRDLFNAIARGDFPKWKLSIQVMPEEDAKKYRFHPFDVTKIWYLQDYPLMEVGIVELNKNPENYFAEVEQAAFSPANVVPGIGYSPDRMLQGRLFSYGDTHRYRLGVNYPQIPVNKPRCPFHSSSRDGYMQNGYYGSLQNYTPSSLPGYKEDKSARDPKFNLAHIEKEFEVWNWDYRADDSDYYTQPGDYYRSLPADEKERLHDTIGESLAHVTHKEIVDKQLEHFKKADPKYAEGVKKALEKHQKMMKDMHGKDMHHTKKKK

SEQ ID NO: 77 - DNA, 727 bp, Helicobacter pylori
  CDS (51)...(674)
gaagcgtgccaaacccgttgccctttggcgtggagcttgccaaatattggatgcataacggctttgtgaatatcaataacgaaaaaatgtctaaaagtttggggaatagcttttttgttaaagacgctctcaaaaactatgatggcgaaattttgcgcaattacttactaggggtgcattatcgctctgttttgaatttcaatgaagaagacttgttagtgagtaaaaaacgcttggataaaatctatcgtttaaaacagcgcgttttagggactcttggaggaataaatccaaactttaaaaaagaaattttagagtgcatgcaagatgatttaaacgtttctaaagcgttgagcgttttagaaagcatgctttcttccactaatgaaaaattggatcaaaaccctaaaaacaaggctttaaagggcgaaattttagcgaatttgaaattcatagaagaactgcttggcatcgggtttaaagaccctagcgcctatttccaattaggcgtgagtgaaagcgaaaaacaagaaattgaaaacaagatagaagaaagaaaacgcgccaaagagcgaaaagattttttaaaagccgatagcatcagagaagagcttttgaaacaaaaaatcgctttgatggacaccccacaaggcacgatctgggagaagtttttttaaacacctccaattttacctttttacacattctagcaacaactttcagcatt

SEQ ID NO: 78 - protein, 208 aa, Helicobacter pylori
MHNGFVNINNEKMSKSLGNSFFVKDALKNYDGEILRNYLLGVHYRSVLNFNEEDLLVSKKRLDKIYRLKQRVLGTLGGINPNFKKEILECMQDDLNVSKALSVLESMLSSTNEKLDQNPKNKALKGEILANLKFIEELLGIGFKDPSAYFQLGVSESEKQEIENKIEERKRAKERKDFLKADSIREELLKQKIALMDTPQGTIWEKFF

SEQ ID NO: 79 - DNA, 410 bp, Helicobacter pylori
  CDS (60)...(329)
ttttaaaagcatagaggattttaagaagcattgtgaaaacttataaataagatttaaaaatgctgacgattgaaaccagtaaaaaatttgataaggatcttaaaattcttgttaaaaacgggtttgatttaaagcttttgtataaagtggttggaaatttagccacagagcaacccctagctcccaaatacaaagaccacccactcaaaggcggtttaaaagattttagggaatgccacttaaaaccggatttattgcttgtctatcaaattaaaaaacaagaaaacaccctctttttagtaaggttaggcagtcatagcgagctgttttgaaccgcccacaccccttataacgcttaaaccaactaccccccttttttagggataaatttagggttgaaacaccgctta

SEQ ID NO: 80 - protein, 90 aa, Helicobacter pylori
MLTIETSKKFDKDLKILVKNGFDLKLLYKVVGNLATEQPLAPKYKDHPLKGGLKDFRECHLKPDLLLVYQIKKQENTLFLVRLGSHSELF

SEQ ID NO: 81 - DNA, 425 bp, Helicobacter pylori
  CDS (78)...(341)
agatgtaggtaacaaagagacagatttgattgttgaggatttttctagttacagcaatgaaagaaaaagggctttaggtgttgaagctcaatcttaaaaaatcttttcaaaaagattttgataaattgcttttgaatgggtttgatgatagcgttttgaatgaagtcattctaaccttaagaaaaaaagaaccgctagatccacaatttcaagatcatgccttaaagggaaagtggaaaccttttagggaatgccacattaagcctgatgttttgcttgtgtatttagtgaaagatgatgaactgattttgttaaggttaggcagtcatagcgagctgttttaatccacccacaccccttataacgcttaaaccaaatcgcttgcgctataatgaactgatattatattttaaaaggaataaaca

SEQ ID NO: 82 - protein, 88 aa, Helicobacter pylori
VLKLNLKKSFQKDFDKLLLNGFDDSVLNEVILTLRKKEPLDPQFQDHALKGKWKPFRECHIKPDVLLVYLVKDDELILLRLGSHSELF

SEQ ID NO: 83 - DNA, 844 bp, Helicobacter pylori
  CDS (111)...(779)
gtcgttattcgcgcttaatgagaacagaggtttttaaaactatggtttcgtttaggtttaattaaatttcgctacaattaaataaaaacgataattttagagagattggcatgcaaggtttatggatttatccagaggatacagaagttttaggggttgcttgtaagagccttttaaaagcactaacgccacgctatcaaaaagtcgccttgttttcgcccattagtggagggtgtgagagcttggaggagtgcgagagcttgaaccctttagaatttcatagtgcgataagcaaacaaaaggctttagagcttgcgagcaccgctcaagaagagttactatttgaaacgattctcaaacgctatgatgaattacaatccacgcatgattttgtcattaatttggggtgtgcgccgaagtttttcttaaacgctcctttagatttaaacaccattttagccaagcatttaaacgcttctgttgtggctgtcgcgcaaacgagtttggaatatttgaaagccatgcactctcatattctcaaaaaagaagcccctttcgctgtagggttatttgcgggcgaaacgcttgaaaaaccacattttttaagcatgtctctttgcaagcaacaatgcgaattagaagcggatctgattgaaagcgtgttgcaaataaaaagcgagattattacccctttagcctttcaaaggggtttggaaaaaaaggctaaaaaacagattaaaaaagtggttttaccagagagcgaaaagatgaaaggattttgaaagctgcacatcgtttgaatttaatgggcgcggtaggattgatcttattaggcgataaagaa

SEQ ID NO: 84 - protein, 223 aa, Helicobacter pylori
MQGLWIYPEDTEVLGVACKSLLKALTPRYQKVALFSPISGGCESLEECESLNPLEFHSAISKQKALELASTAQEELLFETILKRYDELQSTHDFVINLGCAPKFFLNAPLDLNTILAKHLNASVVAVAQTSLEYLKAMHSHILKKEAPFAVGLFAGETLEKPHFLSMSLCKQQCELEADLIESVLQIKSEIITPLAFQRGLEKKAKKQIKKVVLPESEKMKGF

SEQ ID NO: 85 - DNA, 821 bp, Helicobacter pylori
  CDS (79)...(753)
  misc_feature 43: n = A,T,C or G
tatgcctggaggtttggtgtggatgcgtcaagataatttgcgnctacaaccgcaatttaaagccagaaattgggcaaaatgtggaattttaacaccgaatacagcagtcagtattttgattttagagccgccggttttgtccaattgatttctaattacatcaatcaattttcttcaacgctttttgtaaccaacttgcccgcacaagatattatttatgtgcctggttatgaagtttcagggacggctaaatacaagggcttttctttaggcttgagcgtggcgcgatcatggccttctttaaaggggcgtttgatcgctgatgtgtatgaattggcggccacgacaggcaatgtgtttattttgacggcaagttataaaatcccacgcactggtcttagcatcacttggctttcacgcttcgttacggatttgagttattgctcttatagcccttatcgtaacggccctacggatattgacagacggcctagtaattgccctaaaacgcccgggatttttcatgttcataaacccggttatggggtgagcagtttttttgtaacctacaaacccacctataagaagcttaaagggttgagcttgaatgcggtgtttaacaatgtttttaaccaacaatatattgatcaagcaagcccggtgatgagccctgatgaacccaatcaagacaaatacgcaagaggcatggcagagcctggctttaacgctagatttgaaatttcctataagttttaataatggatctaaaaataaggatttcatgggtagcggatctaatcaaaaataaaacattctttaga

SEQ ID NO: 86 - protein, 225 aa, Helicobacter pylori
MWNFNTEYSSQYFDFRAAGFVQLISNYINQFSSTLFVTNLPAQDIIYVPGYEVSGTAKYKGFSLGLSVARSWPSLKGRLIADVYELAATTGNVFILTASYKIPRTGLSITWLSRFVTDLSYCSYSPYRNGPTDIDRRPSNCPKTPGIFHVHKPGYGVSSFFVTYKPTYKKLKGLSLNAVFNNVFNQQYIDQASPVMSPDEPNQDKYARGMAEPGFNARFEISYKF

SEQ ID NO: 87 - DNA, 1350 bp, Helicobacter pylori
  CDS (60)...(1202)
aattttgaaaacattgactcagtttcgctctcaagggcgtttaattcaaggatcaaagcatgaatttaaattttatgcccctattgcatgcttataaccatgcgagcattgattttcatttcaattctagtgctagggatttttgcgtgcatgaagtgcctttgtatgaatttagtaacacgggcgaacatgccgttattcaagtgaggaaaagcggtttaagcactttagaaatgcttcagattttttctcaaattttaggggtaagaatcgctgaattgggttatgcgggcttgaaagataaaaacgcgctgacgactcaattcatctcactccctaaaaaatacgcccctttattagaaaaaaatacgagcaactttcaagaaaaaaaccttaaaatcctgtctttgaattaccaccacaataaaatcaaattggggcatttgaaagggaatcgcttttttatgcgttttaaaaaaatgacccctctaaacgctcaaaaaacaaagcaggttttagaacaaatcgcgcagtttggaatgcctaattattttggctcgcaacgctttgggaagttcaatgacaaccaccaagagggtttaaaaatcttacaaaatcaaacgaaattcgcccatcaaaaattaaacgcttttttaatttcaagctatcaaagttatttgtttaacgcgcttttaagcaaacgattagaaatcagtaaaatcattagcgcttttagtgtcaaagaaaatttagaattttttaaacaaaaaaatttaagcgttgattcagacactctaaaaacccttaaaaaccaagcccacccctttaaaatcttagaaggcgatgtgatgtgccattacccttatgggaagttttttgacgctttagaattagaaaaagagggcgaaaggtttttgaaaaaagaagttgcgcctacggggttactagacggcaaaaaagctctttatgcaaaaaatttgagtttagaaattgaaaaagaattccagcataaccttttaagtagccatgctaaaacgctaggctctaggcggtttttttgggtgtttgtagaaaatgtaacttctcaatacgtgaaagaaaaagcgcaatttgaattgggattttacttgcctaaagggagttatgcgagcgcgttgctcaaagaaatcaagcatgagaaaggagaaaataatgacgaattttgaaaagattatcgcgcaaaacaggatcaaaacgaacgcggttttagcgacttattgcgtgatttttgcttttatcgggttgttggtggatgtcattagaattaatgctaatgatttaggaatagctctttttaaactcatgactttt

SEQ ID NO: 88 - protein, 381 aa, Helicobacter pylori
MNLNFMPLLHAYNHASIDFHFNSSARDFCVHEVPLYEFSNTGEHAVIQVRKSGLSTLEMLQIFSQILGVRIAELGYAGLKDKNALTTQFISLPKKYAPLLEKNTSNFQEKNLKILSLNYHHNKIKLGHLKGNRFFMRFKKMTPLNAQKTKQVLEQIAQFGMPNYFGSQRFGKFNDNHQEGLKILQNQTKFAHQKLNAFLISSYQSYLFNALLSKRLEISKIISAFSVKENLEFFKQKNLSVDSDTLKTLKNQAHPFKILEGDVMCHYPYGKFFDALELEKEGERFLKKEVAPTGLLDGKKALYAKNLSLEIEKEFQHNLLSSHAKTLGSRRFFWVFVENVTSQYVKEKAQFELGFYLPKGSYASALLKEIKHEKGENNDEF

SEQ ID NO: 89 - DNA, 1080 bp, Helicobacter pylori
  CDS (76)...(828)
ctttttcaataaaatcatcagcgatgaaaaacaatgctttttccacgctaaacccttacaccagatcccttaaaaatgaaactcccggtcgttgagagctttttttccttacaaggtgaaggaaaaaggataggcaagcccagtctttttttgcgcttaggggggtgtaacctttcatgcaagggctttaattgtaaaaccttattgaatgatgaaatcctaacaggttgcgacagcttgtatgcggtgcatcccaaattcaaaacatcttgggattattataatgagcctaagcccttgattgaacgattagaggatttagcccctaattataaggattttgatttcattcttacaggcggggagccaagcttgtatttcaataaccctattttaatcagcgttttagagcatttttatcgccaaaaaatccctttatgtgtagagagtaatggttctattttttttgaatttagccctattttaaaagaattgcatttcactctaagcgtcaaactctctttttctttagaggaagaaagcaagcggatccatcttaaagccttacaaaatatcttaaataacgctaaaagcgcgcattttaaatttgttttagagagccaaaacgccgctcaatctattatagaaattcaaagcctcttgaaacaactctccttaaaaaataatgaaatctttttaatgcctttaggcacaaataacaacgagctagacaaaaatctaaaaaccctagcccccctagccataaagcatggtttcaggctaagcgataggcttcatatccgcttgtgggataatcaaaaagggttttaaaaagttaatcatgaccatcaaagttttttcgcccaaataccccactgaattagaagaattttatgctgagcgtatcgctgacaaccctttagggtttatccaacgcttggatcttttgcctagtattagcgggttcgttcaaaaattgcgcgagcatggcggggaattttttgaaatgagagagggtaacaagctcattgggatttgtgggcttaatcctatcaatcaaacagaagccgagctgtgcaa

SEQ ID NO: 90 - protein, 251 aa, Helicobacter pylori
MKLPVVESFFSLQGEGKRIGKPSLFLRLGGCNLSCKGFNCKTLLNDEILTGCDSLYAVHPKFKTSWDYYNEPKPLIERLEDLAPNYKDFDFILTGGEPSLYFNNPILISVLEHFYRQKIPLCVESNGSIFFEFSPILKELHFTLSVKLSFSLEEESKRIHLKALQNILNNAKSAHFKFVLESQNAAQSIIEIQSLLKQLSLKNNEIFLMPLGTNNNELDKNLKTLAPLAIKHGFRLSDRLHIRLWDNQKGF

SEQ ID NO: 91 - DNA, 1710 bp, Helicobacter pylori
  CDS (120)...(1559)
taaagaattttgtgaatattgattgtctcttttaattgaaatttaaagattagtttaaaggattttattcggtgggattgtcagcatcaagcctcattgttcctattagcgttattttaatggtggtttttactaaaagagtcgcactctcgttatttgtgggcattttagtgagcgctgttttaatgcattcgttacacctttcccaactcgtagaatatatttatcataaaatcacttccgttttttacacttacgagccagaaaaggggcttaatttcaatctttccaacctctatgtttttgggtttttaatctttttaggcgtcttaagccaagtgattttaaaatccggtagcgtgcaaaactttgtcaaaaaagctaaaaaatactcaaaaaacgctaaaactcccgaatttatcgcctttttttcaggtatcattatttttgtagatgattattttaacgccctaaccgtggggcaaatctcaaagtctttaaacgacgctcataactccacacgagagcgcttggcttatattatagactccacttcagcgccggtgtgcttgctagtccccatttctagttggggggcgtatattatggggatcatgaataacgacagctcgcccttattaaaagatagtttttcggtgcttgtgcaaagcttaagcagtaattattatgcgatttttgcactcattgcagtctttctcaccattttatggcaaatcaacctccctagcatgagaaagtatcaaaacataggcgtgaaggatttttatagcgaacaagaagaaagctcttcaaaactagcccccttgagtttgttacccctttctattttattgttgattgtgtccatttcatcattgcttttttatacaggagtgattttaaaaaacactgatgcgagtttttcgctcttttatggagggttgttttcgctcatcgttacttatcttttagcttataagtttttagaaaaagggagcttttttaaactcatgttggatggctttaagagtgtggggccggcgatactagtcttaacgctcgcttgggctatcgggcctgtgattagagatgacgctcaaacagggctttacttggctaacatcagcaaggggtttttaaataatggaggaggcgtgtatatgcctttaatcttttttttaatctctgggtttatcgctttttctaccggcacaagctggggagcgtttgcgatcatgcttcccattggagcgggcatggctagtgaaagcgatattattttgattgtttcagcgattctctcaggcgcggtttatggcgatcacacaagccctatttctgacacgactatactatcggctacgggggcagggtgttcggtgcaaagccattttatcacgcaactcccttatgcgaccattgcgatgctttgcagcgcggtgagtttgggggtggcaagctttatgtattcgcgttcgctcgctcttttaatcggtgtggctttgcttgtgggggtgttttatcttttaaaaaaattttatggtgaaaatctaaaaacttgaatattgattgaagaagcttaaaaatcccattttttaaaattaaaataaggttttatcgatccctatttgactcaaaaagagtcttattccattatcaatcaattaaaaaaggttattcaaaaataaccatacaattataaaaatcttc

SEQ ID NO: 92 - protein, 480 aa, Helicobacter pylori
MVVFTKRVALSLFVGILVSAVLMHSLHLSQLVEYIYHKITSVFYTYEPEKGLNFNLSNLYVFGFLIFLGVLSQVILKSGSVQNFVKKAKKYSKNAKTPEFIAFFSGIIIFVDDYFNALTVGQISKSLNDAHNSTRERLAYIIDSTSAPVCLLVPISSWGAYIMGIMNNDSSPLLKDSFSVLVQSLSSNYYAIFALIAVFLTILWQINLPSMRKYQNIGVKDFYSEQEESSSKLAPLSLLPLSILLLIVSISSLLFYTGVILKNTDASFSLFYGGLFSLIVTYLLAYKFLEKGSFFKLMLDGFKSVGPAILVLTLAWAIGPVIRDDAQTGLYLANISKGFLNNGGGVYMPLIFFLISGFIAFSTGTSWGAFAIMLPIGAGMASESDIILIVSAILSGAVYGDHTSPISDTTILSATGAGCSVQSHFITQLPYATIAMLCSAVSLGVASFMYSRSLALLIGVALLVGVFYLLKKFYGENLKT

SEQ ID NO: 93 - DNA, 629 bp, Helicobacter pylori
  CDS (82)...(525)
caaatctctaaagagtaacgctttttaaaaaaatacattttttttaattttttaatcaatcattaaggtgttttaagttaaatttccttatctgttaaacatacggataatgttatatctttaaggaaagaaaatggggttaggacactaataagtttagggattttgttaagcgttttgagtggcgatgatctgaagttgtattcaaaactttcagtctattcggctggaagtgggatgattgggattgatattgacaaacggacattttataagcgagcgttcgctttcacgatgaaatcgttgttcggtgaaaacttgcttttgtttgtcaaattaaagcattctgcgttgacgagcaaacacatgaaagggcctttagaaaaccgccatcaccattctttcactaaaaattatgaaaaagcggttaatggttgtcaaaagtatttccatattaaattgcctgaaggcgctcctagcaacttcaaatcaggttcatacatggccactatggtggtgcgtttttaaagcgttatttggggtattctttaatacccttatcgtcttttaaaataccatcttttaaaagcacaaatttattttttagcccttttttaaatcttcttaaa

SEQ ID NO: 94 - protein, 148 aa, Helicobacter pylori
ISLSVKHTDNVISLRKENGVRTLISLGILLSVLSGDDLKLYSKLSVYSAGSGMIGIDIDKRTFYKRAFAFTMKSLFGENLLLFVKLKHSALTSKHMKGPLENRHHHSFTKNYEKAVNGCQKYFHIKLPEGAPSNFKSGSYMATMVVRF

SEQ ID NO: 95 - DNA, 626 bp, Helicobacter pylori
  CDS (98)...(547)
atgattgtgcacaggaaggatttgaagaagactttgagcgatctcatcgctatgatgacgcataagacttcaaagattttttaaagttttaacattgatgcgttgcgtggtgtattctatcgctaaaagttcgcctttagagttagtgaaaatctatcaaaagcaatgcaggcaatttgattgcgagctggaattggtggatttattccctaaaaataccgccaacgctcaaaaagtttctaaaaaactggctcaaaaaagctactctctagcttttgagccgtatttaaaccctaaggcaaaaaatatcgccttacaccctaaagctcaaaggggcgatagctttgcgtttagtaaaatgttagaaaatcatcttaatattaatttttttatcgctggagcgtatgggtttgaagaaaattttttaaaggattgtcaagcttggagtttgagcgagatgacttttagccatgaagtggctaaaattgtcttatgcgagcaaatctatagggctttaagcattatttttaagcatccataccataaataggaggtgcgcatgcgtttttacattatctttacatttttgtttattgtgggttttggtgtgtttgtttatagtattg

SEQ ID NO: 96 - protein, 150 aa, Helicobacter pylori
MRCVVYSIAKSSPLELVKIYQKQCRQFDCELELVDLFPKNTANAQKVSKKLAQKSYSLAFEPYLNPKAKNIALHPKAQRGDSFAFSKMLENHLNINFFIAGAYGFEENFLKDCQAWSLSEMTFSHEVAKIVLCEQIYRALSIIFKHPYHK

SEQ ID NO: 97 - DNA, 1053 bp, Helicobacter pylori
  CDS (110)...(976)
ctttgtgtttgtaaaagaaacccttgcatcactactcttaagctaattttgtttattataagcaaaacttggatacaatcctaacaaaactgcaaaattaaggaaaaacatgggatttgcagatttctttaaaaattttaagatcaataaattgcggacagcgccaagtaaggaagaacagccaagccattgggtgaaatgccctaaatgttatgcgttaatgtatcataaagaagtgtttagtaaatacagcgtgtgtttgaaatgccattaccatttccgcatgaaagcggctgaaaggattgaatttttatgcgatgtggggagttttgaagagtttgacaagcatttacggcctaatgatcctttaaatttcgtggataaagagagctataaacaacgcattaaaaaatacgaaaaaaggactaaccgcccaagctcagtgatcagcggtgaggctaaaatcaaccgcatgcctttgcagatcgtggtgtttgattttagctttatgggggggagtttaggctctgtggagggcgaaaagatcgtaagagcaatcaatcgcgcggtcgctaaaagagaagcgttattgattgtttcagcgagtgggggggctaggatgcaagaatccacttattcgctcatgcaaatggctaaaacgagcgcggctttgaaccgattgagtgaggccaaactccctttcatttcgctcttaagcgatcccacttatgggggcgttagcgcatcttttgcttttttaggggatctcattatcgcagagccaggggcgatgataggctttgcggggcctagggtgattaagcaaactataggggcggatttgcctgagggctttcaaacagcggaatttttattagagcatggcttgattgatatgattgtgcacaggaaggatttgaagaagactttgagcgatctcatcgctatgatgacgcataagacttcaaagattttttaaagttttaacattgatgcgttgcgtggtgtattctatcgctaaaagttcgcctttagagttagtgaaaatctatc

SEQ ID NO: 98 - protein, 289 aa, Helicobacter pylori
MGFADFFKNFKINKLRTAPSKEEQPSHWVKCPKCYALMYHKEVFSKYSVCLKCHYHFRMKAAERIEFLCDVGSFEEFDKHLRPNDPLNFVDKESYKQRIKKYEKRTNRPSSVISGEAKINRMPLQIVVFDFSFMGGSLGSVEGEKIVRAINRAVAKREALLIVSASGGARMQESTYSLMQMAKTSAALNRLSEAKLPFISLLSDPTYGGVSASFAFLGDLIIAEPGAMIGFAGPRVIKQTIGADLPEGFQTAEFLLEHGLIDMIVHRKDLKKTLSDLIAMMTHKTSKIF

SEQ ID NO: 99 - DNA, 810 bp, Helicobacter pylori
  CDS (95)...(706)
tctgcaaatcccatgtttttccttaattttgcagttttgttaggattgtatccaagttttgcttataataaacaaaattagcttaagagtagtgatgcaagggtttcttttacaaacacaaagcataagagatgaagatttgatcgtgcgcgttttaaccaaaaaccagctcaaaaccctctatcgtttctatggcaaacgccatagcgtgctgaatgtggggcgtaaaattgattttgaagaagaaaacgatgataagtttttacccaagttaaggaatattttgcatttaggctatatttgggaaagagaaatggagcgcttgtttttttggcaacgcttttgcgctctcttgtttaggcatttagaaggcgtgcattctttagatagcgtctattttgacactttagatgatggggctaacaaactcgccaaacagcaccccttaagagtgattttagaaatgtatgcaacgcttttgaattttgaagggcgcttgcaaagttacaattcttgttttttatgcgatgcaaaattagagcgttctgtcgctttagcgcaagggtttattctagcgcacccctcttgtttgaaagctaaaagcctaaatttagaaaaaatccaagctttttttcgcactcaaagcacgattgatttagaaacagaagaagtagaagaattatggcgcacgctgaatttagggttttgaaaggttaaaaatgaaatttaaatttttgaatatggataatgaaagcggttttattttgattgaaaaagaattgaaacgattaaacattctcgctcaagtca

SEQ ID NO: 100 - protein, 204 aa, Helicobacter pylori
MQGFLLQTQSIRDEDLIVRVLTKNQLKTLYRFYGKRHSVLNVGRKIDFEEENDDKFLPKLRNILHLGYIWEREMERLFFWQRFCALLFRHLEGVHSLDSVYFDTLDDGANKLAKQHPLRVILEMYATLLNFEGRLQSYNSCFLCDAKLERSVALAQGFILAHPSCLKAKSLNLEKIQAFFRTQSTIDLETEEVEELWRTLNLGF

SEQ ID NO: 101 - DNA, 999 bp, Helicobacter pylori
  CDS (76)...(927)
gcacataaaatcgcgctactagggtatgaatttgaagcgatcgctcctaaagaatttgaaatttaaggattgatcatgaacgcttggaatacgatttatgatcaatttaaccctatcgcttttagtcttggcagtattgaagtgcattggtatggtttggcgtatgcgtgtgcgattgttaccgctttttatatggcgttaagaatgatccaaaaagaccccaagcgattccccattgaaaggaaggaatttgagagttattttttatgggcggagcttggcattgtgctaggggcaaggataggatacattcttatttatgagcctaattctggctattatttgacgcatttttggcaaatctttaacccttttgatagccatgggaattttgtaggcattcgtgggatgagctatcatggggggttggtggggtttttgatcgcttcgtatctttatagccgtaaggatttgaaaaagcttttgatttatttggatttgattgcgatcagcctgcctttagggtatgtttttgggaggattgggaattttttaaaccaggagcttgtgggaagaattgtccccaaagacagccatttagggcaaatcataggcattatggtggataatgagttgcgttatcccagccaattgattgaagcgtttttagagggggttatcgtgtttttaatggtaatgtgggctaaaaaacacaccaaaacgcatgggttgctgattgtggtttatggtttggggtattccttgatgcgctttattgcggaattttacagagagccggacagccaaatgggggtttattttttaaatttgagcatggggcagattttaagcttatttatggtaattgtttcgttagggattttattgtatgctacaaaaaattctaaaaaaataaaggaaaatcaatgaaatttttggatcaagaaaaaagaagacaattattaaacgagcgccattcttgcaagatgtttgatagcc

SEQ ID NO: 102 - protein, 284 aa, Helicobacter pylori
MNAWNTIYDQFNPIAFSLGSIEVHWYGLAYACAIVTAFYMALRMIQKDPKRFPIERKEFESYFLWAELGIVLGARIGYILIYEPNSGYYLTHFWQIFNPFDSHGNFVGIRGMSYHGGLVGFLIASYLYSRKDLKKLLIYLDLIAISLPLGYVFGRIGNFLNQELVGRIVPKDSHLGQIIGIMVDNELRYPSQLIEAFLEGVIVFLMVMWAKKHTKTHGLLIVVYGLGYSLMRFIAEFYREPDSQMGVYFLNLSMGQILSLFMVIVSLGILLYATKNSKKIKENQ

SEQ ID NO: 103 - DNA, 1104 bp, Helicobacter pylori
  CDS (86)...(994)
agcgaattagccttgcttttaaagggtaagagtgtgctagagagcatgaacgatttgatcagacgcgcttaaaaggaaagagagcatgcaagatttttcaagtttattattaaaactacaagagtattggaagaatcaaggctgtttggtgatccagccttatgatattcctgcaggagctgggacattccatccggccacgcttttaaggagtttggataaaaagccgtggaatgtggcgtatgtcgcgccctctagaaggcctactgatgggcgctatggggaaaaccctaaccgcttggggagttattaccaattccaagtagtcatcaagcccagcccttctaatatccaggaactctatttaaaaagcttagaagtgttagggataaaccttaatgagcatgatatacgatttgtagaagacaattgggagagtccgactttaggggcatgggggcttggctgggaagtgtggcttgatggcatggaagttacgcaattcacttatttccagcaagtggggggcattgcttgtagccctattcctgtagagatcacttacggcttagaaagattagcgatgtatgtgcaaaaagtggaaaatatcctagagattgaatgggctaaaaaaaatcatgacagcgtgaattacgcacaagtgcatttggaaagcgaatacgaattcagcaagtatcattttgaaacagcgagcgtgaaacggctattagaaatgtttaaaaacgctcaagccgaagccttgcattgcttggaaaacaagctccccttgccggcttatgattttgtgatgttatgctcgcattttttcaatattttagacgccagaaaagcgatttcggtggctgaaaggcaaaattatattttacaaatcagggatttagccaaagggtgtgcgcttctttataaagaacaagaagaagagagggaagagcgtttaaaaaacgctttaacaaaggctgaaaatggcgttagttaaggaagtgttggtagttttgaatcgcctttcgccttttgaactccaagaatcatgggataatagcgggttgaatgtggggagtgaaaatagtgaatttagcgagattg

SEQ ID NO: 104 - protein, 303 aa, Helicobacter pylori
MQDFSSLLLKLQEYWKNQGCLVIQPYDIPAGAGTFHPATLLRSLDKKPWNVAYVAPSRRPTDGRYGENPNRLGSYYQFQVVIKPSPSNIQELYLKSLEVLGINLNEHDIRFVEDNWESPTLGAWGLGWEVWLDGMEVTQFTYFQQVGGIACSPIPVEITYGLERLAMYVQKVENILEIEWAKKNHDSVNYAQVHLESEYEFSKYHFETASVKRLLEMFKNAQAEALHCLENKLPLPAYDFVMLCSHFFNILDARKAISVAERQNYILQIRDLAKGCALLYKEQEEEREERLKNALTKAENGVS

SEQ ID NO: 105 - DNA, 1620 bp, Helicobacter pylori
  CDS (66)...(1538)
ggcaaaggaatgcgattttagctaaccacatcactctcatgcaagagctttaaaaagtcctaaaaatggcgcaaaaaactcttttgattatcactgatggcattgggtatcgtaaagatagcgatcataacgctttcttccatgccaaaaaacccacttatgatttgatgtttaaaaccttgccttatagcctgattgatacgcatggcttgagcgtgggcttacctaaggggcaaatgggaaattctgaagtggggcatatgtgtattggggctggtagggtgctctatcaggatttagtcaaaatttctttaagccttcaaaacgatgaattaaaaaacaaccccgcttttttaaacacgatccaaaaaagccctgtggtgcatcttatgggtttaatgagcgatggaggcgtgcattcacacattgagcattttatcgctctggctttagagtgtgaaaaatcccataaaaaagtctgtctgcatttaatcaccgatgggcgcgatgtcgctcctaaaagcgctttaacttatttaaaacaaatgcaaaatatctgcaatgaaagcattcaaatcgctaccataagcggtcgtttttatgccatggatagggataagcgctttgaaaggattgagcttgcgtatcatagcttaatggggcttaatcacacgcctttaagccctagcgagtatatccaaagccagtatgataaaaatatcaccgatgaatttatcatgcccgcttgttttaaaaattattgcggcatgcaagatgatgagagttttatttttatcaatttcaggaatgatagggctagagaaatcgtgagcgctttaggccaaaaacaattcagtggctttaagcgccaagtttttaaaaaactccatatcgctaccatgacgccttatgataacactttcccctaccctgttttattccccaaagaaagcgttcaaaacacgctcgctgaagtggtctctcaacacaacctgacccaaagccatatcgctgaaactgaaaaatacgcgcatgtaacctttttcatcaatggcggagtggagacgccttttaaaaatgaaaaccgggtgcttatccaaagccctaaagttaccacttatgacttaaagcctgaaatgagcgctaaagaagtaacccttgcggtgttagagcaaatgaaactaggcacggatttgatcattgtgaattttgctaatggcgatatggtagggcatacggggaattttgaagcgagcgtcaaagcggtggaagcagtggatgcatgtttaggggaaatcctttcactggctaaaaaattggattacgccatgcttttaaccagcgatcatgggaattgcgagcgcatgaaagacgaaaaccaaaaccccttaaccaaccacaccgccgggagcgtgtattgctttgttttaggggatggagtcaaatccataaaaaacggagccttaaacaatatcgctagcagcgtgttaaaactcatgggccttaaagccccagcaacgatggacgaacccctattttaaactaaaggaaaagaatgcaaattgatgacgcattattgcaacgcttggaaaaattgagcatgctagagattaaagatga

SEQ ID NO: 106 - protein, 491 aa, Helicobacter pylori
MAQKTLLIITDGIGYRKDSDHNAFFHAKKPTYDLMFKTLPYSLIDTHGLSVGLPKGQMGNSEVGHMCIGAGRVLYQDLVKISLSLQNDELKNNPAFLNTIQKSPVVHLMGLMSDGGVHSHIEHFIALALECEKSHKKVCLHLITDGRDVAPKSALTYLKQMQNICNESIQIATISGRFYAMDRDKRFERIELAYHSLMGLNHTPLSPSEYIQSQYDKNITDEFIMPACFKNYCGMQDDESFIFINFRNDRAREIVSALGQKQFSGFKRQVFKKLHIATMTPYDNTFPYPVLFPKESVQNTLAEVVSQHNLTQSHIAETEKYAHVTFFINGGVETPFKNENRVLIQSPKVTTYDLKPEMSAKEVTLAVLEQMKLGTDLIIVNFANGDMVGHTGNFEASVKAVEAVDACLGEILSLAKKLDYAMLLTSDHGNCERMKDENQNPLTNHTAGSVYCFVLGDGVKSIKNGALNNIASSVLKLMGLKAPATMDEPLF

SEQ ID NO: 107 - DNA, 1440 bp, Helicobacter pylori
  CDS (72)...(1379)
atagtaaaatcaaataaccttattttaaccaaaggttattaaaattatccttattatagagagtttttaacatgaattttcaagaaaatttagccgctttggatttggagtatctttggcacccttgttcgcaaatgcaagagcatcaaaatttccccattatccccattaaaaaggctcaagggatttacctctatgattttaatgataacgcttacatggatttgatcagctcatggtgggtgaatctttttgggcataataacgcctacatcagccagcaactcaaaaatcaaattgatgatttagagcatgtccttttggcttcttttagccataagcccattatcacgctctctcaaaggctttgccagctcactcatatggataaatgcttttatgcggataacggctcatcttgtgttgaaatcgctttgaaaatgagctatcacgcccattttttaaagaatcaaacgcgccgcaaaaagctttttttatcgctctctaattcctatcatggcgagactttgggagcgttaagcgtgggcgatgtgaaactttataaagacacttacacccctttattgctcaaaaatctcaccacacctgtgcctaaaaacgaccatgaaatagaaaatagtttgaacgctttaaagcgtttgttagacaagcatagtgaagaaatttgcgctttcattgcagagcctcttttgcaatgcgcagggaatatgcatatttatagcgcaagatatttaaaacaagccgttttattgtgcaagcaaaaaaacatccacattatttttgatgaaatcgctaccgggtttgggcgcacagggagcatgtttgcttatgaacaatgcgaaattaagccggattttttatgcttgtctaaggggattagtggggggtatttgcctttaagcgcactattaacccataatgaaatctataaccaattttacgccccctatgaagaaaataaagcgtttttgcattcgcacagctacacaggaaacgctttggcatgcgcatgcgcgaacgctacgctggatatttttgaaaaagaaaatgttattgaaaagaacaaggctttaagcgggtttatttttaatacgctccaaaacgcattaaaacccttgatggagcaacaagtggtgtctgatttaaggcatttgggcatggtctttgcctttgaagtctttattcaaaccaaagagcgtttgagtttggcggtttttaaaaaaactctaaaaaaaggcctgttattacgccctttaaacaacaccatttacctcatgcccccttacattatcacgcatgaagaagtcaaaaaggcggttgcggggctagtggaaattcttgatgagttaagaaaaggctgaaagcgtttttaaaaataaaatagtaaaaagcttgaattggatcaagcgatagcttttt

SEQ ID NO: 108 - protein, 436 aa, Helicobacter pylori
MNFQENLAALDLEYLWHPCSQMQEHQNFPIIPIKKAQGIYLYDFNDNAYMDLISSWWVNLFGHNNAYISQQLKNQIDDLEHVLLASFSHKPIITLSQRLCQLTHMDKCFYADNGSSCVEIALKMSYHAHFLKNQTRRKKLFLSLSNSYHGETLGALSVGDVKLYKDTYTPLLLKNLTTPVPKNDHEIENSLNALKRLLDKHSEEICAFIAEPLLQCAGNMHIYSARYLKQAVLLCKQKNIHIIFDEIATGFGRTGSMFAYEQCEIKPDFLCLSKGISGGYLPLSALLTHNEIYNQFYAPYEENKAFLHSHSYTGNALACACANATLDIFEKENVIEKNKALSGFIFNTLQNALKPLMEQQVVSDLRHLGMVFAFEVFIQTKERLSLAVFKKTLKKGLLLRPLNNTIYLMPPYIITHEEVKKAVAGLVEILDELRKG

SEQ ID NO: 109 - DNA, 360 bp, Helicobacter pylori
  CDS (82)...(294)
aaagctaaacaagagcaagagaaacgcatggcataagagccatgcgcttggcagtgaaacaaaagaaaaaaaggaaacaacatgggaaaaatgaaacaagaaacagcgattgactatgaaaaattagcgaatcattggaataataatgatgaaaacagcgaagcactaaacgcttttgcagacgcttacctttataaacatgagaaaaagagtcaaaagattcgggcaatagagataagttctctaaacaaagcctgcatgggagaattttaccacaaaaacccaaaattattttaataacgatcgctccaaggaaccaacgccccatgacctcaagaaaagagaatagcttgaatcggt

SEQ ID NO: 110 - protein, 71 aa, Helicobacter pylori
MGKMKQETAIDYEKLANHWNNNDENSEALNAFADAYLYKHEKKSQKIRAIEISSLNKACMGEFYHKNPKLF

SEQ ID NO: 111 - DNA, 1300 bp, Helicobacter pylori
  CDS (62)...(1255)
ttgctaactcaaaaggcgaattgcaatattctaacacgcctaatatttataaggcgattaaagacatagaaacagagctagatgcactagaaaacaggctagaaacaataagagttttaggcatgaaaactatttttataaagttttgggtagtgcaacttctcaaatagaaagtttgaaaaaaagagaaaatgccctatttgatcatttagatagtctaaaaagtttattagaaaaaacacattgggaaaaagaaaaattcacgcccccaataaatgaaaaagaacttaataggcaacttaaagaagtgagatggttcaataaagaaactccaacttctaaaaacacttataagaaaattcaaaaattagctgtttataaaagccctttaataaaagattatctttataccattaaaaaactttttgccacacaaaaaaagattatagatttagaaaaaaattataaagatttaagagccttaaaggaagaatttagcaaagatttagaaactgatttatcccattcaaaaaaacgctttgaactttacactagactaaagagcatgagcaaagtttttataagcaaaagcattgttaaaaatttagaaaaaattgctttagattttaaaagcgatagacatagtatttcgcaaagagcttttgaattttttaagtatatgaattatcaaaatttaagcttgactgataaaggcaatatgtttttagtggctaagttttttaaagatagtgctttacttgttaatattgctaggtttgaaatgaaaaagatagatgatagtgttaaaaattctaacccacaagacaatttattagacaaacaagtttggctcaatcttttagagcatttaaaaagacttgaagaggaaaattattgttttgctaagaaacgaaaagaattcttagagactagagcgatggagctatcaaaagatttaaaatttttaacacaggctaatgaaaatgatttgcccatttatgaaagagggcaaagggataaaatcattaaacgctgtgaaaaatcgcttaactttttgcagaaagaattacaatgctttaaaaccttattgaaaagtgcaagtatagctttagaaaacttgcaaaataaccatcaaatcacagccgttacacaagacacgcaagaaaacacaaacgcgctcaaaaatactactcaagattttaacaaaactaccaatgaaccaacaaaccctaacaataactatggaatggatttttaaaaccatccataaaattaaataactttacttagcgtatttttt

SEQ ID NO: 112 - protein, 398 aa, Helicobacter pylori
RHRNRARCTRKQARNNKSFRHENYFYKVLGSATSQIESLKKRENALFDHLDSLKSLLEKTHWEKEKFTPPINEKELNRQLKEVRWFNKETPTSKNTYKKIQKLAVYKSPLIKDYLYTIKKLFATQKKIIDLEKNYKDLRALKEEFSKDLETDLSHSKKRFELYTRLKSMSKVFISKSIVKNLEKIALDFKSDRHSISQRAFEFFKYMNYQNLSLTDKGNMFLVAKFFKDSALLVNIARFEMKKIDDSVKNSNPQDNLLDKQVWLNLLEHLKRLEEENYCFAKKRKEFLETRAMELSKDLKFLTQANENDLPIYERGQRDKIIKRCEKSLNFLQKELQCFKTLLKSASIALENLQNNHQITAVTQDTQENTNALKNTTQDFNKTTNEPTNPNNNYGMDF

SEQ ID NO: 113 - DNA, 630 bp, Helicobacter pylori
  CDS (105)...(518)
gttgcaacttatcttgttgttctttagtgggatacaagcggaatttaaaacccttattgactttcatagaaagtattttaacctctttttgttaaaataggtctatgaaaaaaattgatgatatgagacacggaagacattgtgtttttttaatgcatgtgcattttgtatttgttactaaatacaggcgttcagcattcaataaggaagtgatagattttttaggatcggtgtttgccaaagtgtgtaaggactttgagagcgaattggtagaatttgatggggagagcgatcatgtgcatttgcttatcaactaccctccaaaagtgagcgtgagtaagttagttaattctttaaaaggcgttagcagtcgtttgactagacaacaccatttcaaaagcgttgaagctagtttgtgggggaagcatttatggtcgcctagttatttcgctgggagttgtggggacgcgcctttagagatgattaagcaatacatacaagatcaagaaacaccgcattaaattagctaactttgatttttaagtagaacgcgctaaaaagcgaatggatctaagtgaaacaatgttcaaatagcctaacggctaaacgcttacatctccgccctaaagg

SEQ ID NO: 114 - protein, 138 aa, Helicobacter pylori
MKKIDDMRHGRHCVFLMHVHFVFVTKYRRSAFNKEVIDFLGSVFAKVCKDFESELVEFDGESDHVHLLINYPPKVSVSKLVNSLKGVSSRLTRQHHFKSVEASLWGKHLWSPSYFAGSCGDAPLEMIKQYIQDQETPH

SEQ ID NO: 115 - DNA, 1080 bp, Helicobacter pylori
  CDS (101)...(1000)
tggatttaaaagtgagcgatttggtgcgtgtggccaatgaatattttaaagacacccaatcaaccaccgtgtttttgaaaccttaaaagagccttataacatgcaatttcattcatctagcgcgttgattacgccttttaaaaaagatttgagcgttgatgaggccgcttatgaaaccttgatcaagcgccaaatttttcagggcatggacgcatgcgtgcctgttggcacgacaggagaatccgccacgctcacccacaaagagcacatgcgttgcattgaaatcgccatagaaacttgcaaaaacactaaaacgccctcaaattcgcgcatgaaagtgttagccggcgtgggcagtaacgccacgagcgagtccctttctttagcaaagttcgctcaaaaaatcggcgcggatgcgattttatgcgtaagcccttattataaccgccccacccaacaaggcttgtttgaacattataaaaccatcgctcaatcggtggaaatccctgtcatgctttatgatgtgccaagtagaacaggcgtgtctattgaagttccaaccgccctcaaactctttagagaagtccctaacattaaagccattaaagaagcgtctggctctttgaaaagggtaacagaattgcattattatgaaaaagattttaaaatttttagtggggaagattcgctcaaccactccatcatgttttcaggggggtgcggcgtgatttcagtgaccggtaatttaatgcccaatctgatttcacaaatggtcaattgcgcgctcaaacaaaaataccaacaagccctagaaatccaaaataagcttttttgtttgcaccaagccctttttgtagaaacaaatcccatccctattaaaatggctatgcatttagccggcttgattgaaaacccaagctacagactgcctttagtggccccaagcaaagaaacgattcaacttttagaaaaaactttacaacaatatgaggtaattgcatgaatggttccaatcacatgaaaaataaaaccctagtgatcagcggcgcgactagagggattggcaaggcgatattgtac

SEQ ID NO: 116 - protein, 300 aa, Helicobacter pylori
MQFHSSSALITPFKKDLSVDEAAYETLIKRQIFQGMDACVPVGTTGESATLTHKEHMRCIEIAIETCKNTKTPSNSRMKVLAGVGSNATSESLSLAKFAQKIGADAILCVSPYYNRPTQQGLFEHYKTIAQSVEIPVMLYDVPSRTGVSIEVPTALKLFREVPNIKAIKEASGSLKRVTELHYYEKDFKIFSGEDSLNHSIMFSGGCGVISVTGNLMPNLISQMVNCALKQKYQQALEIQNKLFCLHQALFVETNPIPIKMAMHLAGLIENPSYRLPLVAPSKETIQLLEKTLQQYEVIA

SEQ ID NO: 117 - DNA, 1709 bp, Helicobacter pylori
  CDS (68)...(1624)
aaaaaaccttaaaacgcttaaaaaactatcgcttgatcaagctcttttactatttaatctttaaaaaatgcttttgatcgttttttttaaattttattttcaatattcaattaaaaaaaaatcattttattttatttttgttataattcaagctatttttattttcaatctaaggaggtgtcgcatggacaatcaaaagataacgcatcaaaatatcacgcaaaaacaaggcgagcttaaaagagacatgaaaatgcgccatctcttaatgattgcatttggaggagcgatcggcacagggctttttgtaggcactgggggtaatattgcgagcgctggccctttagggaccttgatcgcttattgttttggagggcttgtggtctattgtatcatgctctctttaggcgaattggctagcgtttatcccactacaggaagttttggggattatgcggctaaattcataggccctggcacgggctatatggttttttggatgtattggcttggctgggtgatcacggtggcgttagaatacatcgctataggcatgctcatgcaacgctggtttgcggatattcccatccattattgggttattttatgcattgcgttagtttttttattgaactttttttcggttaaaatttttgccgagggcgagtttttctttagcctgattaaagttttagcggtgatcgcttttataggcattggcgcgattgggattatttatcaaatctattcgcatgggtttggttctatttttgataatttccattttggcgataaggggtttttccctaatgggagcgcagcggtttttagcgcgatgctcgctgttatttttgctttcactggcacagaggtgattggggtggctgtgggagagactaaaaacgctagcgaagtgatgcccaaagcgattaaagcgaccttgtggcggattgtctttttctttttaggctctgtgtttgtcatttctgtttttttacccatgaatgattcttctatcacgcaaagcccttttgtgagcgttttagaacgcattaatttgccctttattggcatgggtatcccttatgtggctgatataatgaacgctgttatcattacggcgatgttttctaccgctaattcagggctttatggagcgagccgcatgatttatgggctgtccaaacaaaagatgttttttaaggttttttcccaactcaaccgacaaggcacgcccacttatgcgatgtttttttccctttctttttctctcatagggcttttagtccaaatttatgccaaagaaaatgtcgtggaagctttgattaatgtgatcagtttcacggtgattattgtgtgggttagcgtgtctgtttcgcaatattctttccgcaagcaatacttaaaagccgggcattctttagaggatttgccttataaagccccctttctaccctttttgcaactcatagggatcactgggtgtgccatcggcgtgattggttcggctatggataaggatcaacgcattgggatgattttaacgattgttttcgctgttatttgttacattggatactattttacacaaaaagctaatgaaaataacaaaaaagatttgatataatcttttcttaattttgaagtttagcaaattttaaggaagtaaccatgatgaaaaaaaccctttttatctctttggctttagc

SEQ ID NO: 118 - protein, 519 aa, Helicobacter pylori
MLLIVFFKFYFQYSIKKKSFYFIFVIIQAIFIFNLRRCRMDNQKITHQNITQKQGELKRDMKMRHLLMIAFGGAIGTGLFVGTGGNIASAGPLGTLIAYCFGGLVVYCIMLSLGELASVYPTTGSFGDYAAKFIGPGTGYMVFWMYWLGWVITVALEYIAIGMLMQRWFADIPIHYWVILCIALVFLLNFFSVKIFAEGEFFFSLIKVLAVIAFIGIGAIGIIYQIYSHGFGSIFDNFHFGDKGFFPNGSAAVFSAMLAVIFAFTGTEVIGVAVGETKNASEVMPKAIKATLWRIVFFFLGSVFVISVFLPMNDSSITQSPFVSVLERINLPFIGMGIPYVADIMNAVIITAMFSTANSGLYGASRMIYGLSKQKMFFKVFSQLNRQGTPTYAMFFSLSFSLIGLLVQIYAKENVVEALINVISFTVIIVWVSVSVSQYSFRKQYLKAGHSLEDLPYKAPFLPFLQLIGITGCAIGVIGSAMDKDQRIGMILTIVFAVICYIGYYFTQKANENNKKDLI

SEQ ID NO: 119 - DNA, 1529 bp, Helicobacter pylori
  CDS (230)...(1390)
ttaagcttgaatgcgggcaatatccaaatccagagcatgcccaaagttaaagagcgagtgagtgtcccctctaaagacgatacggatctattcttaccacgattctattaaggactctattaaggcggtggtgaatatctccactgaaaagaagattaaaaacaattttataggtggcggtgtgtttaatgacccctttttccaacaattttttggggatttgggtggcatgattcctaaagaaagaatggaaagggctttaggcagcggcgtaatcatttctaaagacggctatattgtaactaataaccatgtgattgatggcgcggataagattaaagttaccattccagggagcaataaagaatattccgccactctagtaggcaccgattctgaaagcgatttagcggtgattcgcatcactaaagacaatctgcccacgatcaaattctctgattctaatgatatttcagtgggcgatttggtttttgcgattggtaacccttttggcgtgggcgaaagcgttacgcaaggcattgtttcagcgctcaataaaagcgggattgggatcaacagctatgagaatttcattcaaacagacgcttccatcaatcctggaaattccggcggcgctttaattgatagccgtggagggttagtggggattaataccgctattatctctaaaactgggggcaaccacggcattggctttgccatcccttctaacatggttaaagatactgtaacccaactcatcaaaaccggtaagattgaaagaggttacttgggcgtgggcttgcaagatttgagtggcgatttgcaaaattcttatgacaacaaagaaggggcggtagtcattagcgtagaaaaagactctccggctaaaaaagcagggattttggtgtgggatttgatcaccgaagtcaatgggaaaaaggttaaaaacacgaatgagttaagaaatctaatcggctccatgctacccaatcaaagagtaaccttaaaagtcattagagacaaaaaagaacgcgctttcaccctcactctagctgaaaggaaaaaccctaacaaaaaagaaaccatttctgctcaaaacggcgcgcaaggccaattgaacgggcttcaagtagaagatttaactcaagaaaccaaaaggtctatgcgtttgagcgatgatgttcaaggggttttagtctctcaagtgaatgaaaattccccagcagagcaagccggatttaggcaaggtaacattatcacaaaaattgaagaggttgaagttaaaagcgttgcggattttaaccatgctttagaaaagtataaaggcaaacccaaacgattcttagttttagacttgaatcaaggttataggatcattttggtgaaatgataggggtgggtcgttagtcgcatgtctttgattagagtgaatggggaagcttttaaactctctttagaaagtttagaagaagacccttttgaaactaaagaaacgctagaaacgcttatcaaacaaacgagcgttg

SEQ ID NO: 120 - protein, 387 aa, Helicobacter pylori
MIPKERMERALGSGVIISKDGYIVTNNHVIDGADKIKVTIPGSNKEYSATLVGTDSESDLAVIRITKDNLPTIKFSDSNDISVGDLVFAIGNPFGVGESVTQGIVSALNKSGIGINSYENFIQTDASINPGNSGGALIDSRGGLVGINTAIISKTGGNHGIGFAIPSNMVKDTVTQLIKTGKIERGYLGVGLQDLSGDLQNSYDNKEGAVVISVEKDSPAKKAGILVWDLITEVNGKKVKNTNELRNLIGSMLPNQRVTLKVIRDKKERAFTLTLAERKNPNKKETISAQNGAQGQLNGLQVEDLTQETKRSMRLSDDVQGVLVSQVNENSPAEQAGFRQGNIITKIEEVEVKSVADFNHALEKYKGKPKRFLVLDLNQGYRIILVK

SEQ ID NO: 121 - DNA, 990 bp, Helicobacter pylori
  CDS (39)...(902)
atgatagtattctaataaaactattttaaaggtgatccatgagtaagagtttataccaaactttaaatgtgagcgaaaacgccagccaagatgaaatcaaaaaatcctaccgccgtttagcccgacaataccacccggatttgaataaaaccaaagaagccgaagagaaattcaaagaaatcaacgccgcttatgaaattttgagcgatgaagaaaaacgccgccaatacgatcagtttggcgataacatgtttggcgggcagaatttcagcgattttgccagaagccgtggtcctagtgaagatttagacgatattttaagctctatttttgggaaaggaggcttttcgcaaagattttctcaaaactcgcaaggcttttctggctttaatttttccaatttcgcccctgaaaatttagacataaccgccgctttaaatgtctctgttttagacacccttttaggcaataaaaaacaagtgagcatcaataatgagacttttagccttaaaatccctattggcgtggaagagggcgaaaagattagggttcgcaacaaggggaaaacggggcgaacgactaggggcgatttgctcttagagatccatattgaagaagatgaaatgtataggcgcgagaaagatgatattacccaaatctttgatttacccttaaaaacggctctttttggagggaaaattgaaatcgctacttggcataaaaccttaaccctaaccattccccctaacaccaaagcgatgcaaaaattccgcattaaagaaaaagggatcaaaaacagaaaaacttcgcatgtgggggatttgtatttgcaggctcgtttgattttgcctaaaactgaaacgctttctaatgagttgaaagcgttattagaaaaagaattgtaaggaggaatcgtgtgcgattatgatgaaccgctttatttaatcagcgtcgtggctaaaatcttaggcgtgcaccctcaaaccttgc

SEQ ID NO: 122 - protein, 288 aa, Helicobacter pylori
MSKSLYQTLNVSENASQDEIKKSYRRLARQYHPDLNKTKEAEEKFKEINAAYEILSDEEKRRQYDQFGDNMFGGQNFSDFARSRGPSEDLDDILSSIFGKGGFSQRFSQNSQGFSGFNFSNFAPENLDITAALNVSVLDTLLGNKKQVSINNETFSLKIPIGVEEGEKIRVRNKGKTGRTTRGDLLLEIHIEEDEMYRREKDDITQIFDLPLKTALFGGKIEIATWHKTLTLTIPPNTKAMQKFRIKEKGIKNRKTSHVGDLYLQARLILPKTETLSNELKALLEKEL

SEQ ID NO: 123 - DNA, 1350 bp, Helicobacter pylori
  CDS (113)...(1285)
acctgaataaagagttgcaagacgctctgcacaaacactctaaaaataccaaaaccccaacgaaaaatttaaacacccctacgaatttttacgaattgattttatttaaaaaatgagcctgacttcgcttttaaacccaaaaagcctagaagattttttaggccaagagcatttagtagggaaagacgcccccttatttaaagccctacaatccaaacacttcccccatgcctttttctatggccctcctggcgtgggtaaaacaagcctggctcaaatcatcgcctatatgctagagcgccccattcttttattcaatgcgacggattttaaattagaggatttgcgccttaagcttaaaaattaccaaaatacccttttaaaacccgttgtttttattgatgaaacccacagattgaataaaacccaacaagaatttttactccccattatggaaaaagatcacgctttaattttaggggctagcacgcaagatcctaattacagcctaagccatgcgatccgatcaagaagttttatttttgaattaacccccctaaacaagagcgatttagacaggctttgcgctaaagctttaacattgctcaaaaaacaaatagagcctggcgctaaaacctatcttttaaacaacagcgctggcgacgctagagcgttattaaaccttttagatttgagcgctaaaatagaagatcctatcactttaaaaacgctacaatccttacggcctcatagcctaaatgatggatcttatagcgatgatacgcattataaccttactagcgcgttaatcaaatctttaagagggagcgatgaaaacgcttccatctattatctggcgcgcttgattgctggcggggaaaacccggaatttatcgccagaaggctggtgatttttgcgagcgaagatattggtaacgctaacccgaacgcccttaatttagccgcttcttgtttgtttgcagtcaaacaaatcggctaccctgaagcgcgcatcattttaagccaatgcgtgatttatctggcttgttcgcccaagtctaacacggcttatagagcgatcaatcaggctttggattgcgttcaaaaaggctcactctaccctattcctaaacacctgctgcctaacgctaaagattacctttacccgcatgattataacggctatgtcaaacaagattatttggaaaaacccctagatttggtttcttctcaaggcataggatttgaaaaaacccttttagaatggcttgataagataagaaattgatcttataagttacattaaaatgcgacaatggtaataaaaaatcaatatttttggattgaatt

SEQ ID NO: 124 - protein, 391 aa, Helicobacter pylori
MSLTSLLNPKSLEDFLGQEHLVGKDAPLFKALQSKHFPHAFFYGPPGVGKTSLAQIIAYMLERPILLFNATDFKLEDLRLKLKNYQNTLLKPVVFIDETHRLNKTQQEFLLPIMEKDHALILGASTQDPNYSLSHAIRSRSFIFELTPLNKSDLDRLCAKALTLLKKQIEPGAKTYLLNNSAGDARALLNLLDLSAKIEDPITLKTLQSLRPHSLNDGSYSDDTHYNLTSALIKSLRGSDENASIYYLARLIAGGENPEFIARRLVIFASEDIGNANPNALNLAASCLFAVKQIGYPEARIILSQCVIYLACSPKSNTAYRAINQALDCVQKGSLYPIPKHLLPNAKDYLYPHDYNGYVKQDYLEKPLDLVSSQGIGFEKTLLEWLDKIRN

SEQ ID NO: 125 - DNA, 869 bp, Helicobacter pylori
  CDS (76)...(759)
aagaaacttttaacaaacaattcaagggatttggcgattttgggtcttaaaaaatatgctattttatggtctttaatggggttttatgcaggattgaacgcgcttgattatgacaccatagacccaaaatactacaagtatatcaagtattataaagcctatgaggataaagaagttgaagaattgatcagagacttaaaaagggcgaacgctaaaagcgggcttattttagggatcaataccgggtttttttacaatcatgaaatcatggttagaactaatagctctagcatcacggggaatattttaaattatttgttcgcttacggcttgcgttttggctatcaaactttcaggccgtcgttttttgcgcgcttggtcaagccaaatatcattggcaggcgcatttatatccaatattatggaggagctcctaaaaaagcgggctttggggatgtagggtttcaatcggttatgctgaatggggattttttattggattttcctttgccttttgtggggaaatacctttatatggggggttatatgggtttaggtttgggggttgtagcgcatggggtgaattacacggcggaatgggggatgtcttttaacgcaggattggctctaacggtattagaaaaaaaccgcattgaatttggatttaaaattttgaataatttcccttttttgcaatctaattcttcaaaagagacttggtggggagctatggcaaacattgggtatcaatatgtgttctaaaaaaataagaaatctcattttatgctttggttttatgttgggcttgcacgctgaagaaaatacgactgaaggaaatatgactgaagaaaatatctctaaagacgctc

SEQ ID NO: 126 - protein, 228 aa, Helicobacter pylori
MGFYAGLNALDYDTIDPKYYKYIKYYKAYEDKEVEELIRDLKRANAKSGLILGINTGFFYNHEIMVRTNSSSITGNILNYLFAYGLRFGYQTFRPSFFARLVKPNIIGRRIYIQYYGGAPKKAGFGDVGFQSVMLNGDFLLDFPLPFVGKYLYMGGYMGLGLGVVAHGVNYTAEWGMSFNAGLALTVLEKNRIEFGFKILNNFPFLQSNSSKETWWGAMANIGYQYVF

SEQ ID NO: 127 - DNA, 1171 bp, Helicobacter pylori
  CDS (89)...(1096)
ggaaagaattgattcaaaacgctatcaaacaatacgctgatgatgtgaaaaagggaaacttccctaacgaattagaaagttatcattaatgaaagaacggatagtcaatttagaaactttggattttgaaatttctcaagaagtgagtttgcgccctagtctttgggaagattttatcggtcaagaaaagattaaaagcaatttgcaaatttctatttgcgcggctaaaaaacgccaagaaagtttggatcacatgcttttttttggcccgcccggtttgggtaaaacttcaatcagccatatcatcgctaaagaaatggaaaccaatatcaagatcaccgccgctcccatgatagaaaaaagcggtgatttagccgccattttgaccaatttgcaagctaaagacattctttttattgatgaaatccaccggctcagcccagcgattgaagaggttttatacccggcgatggaagattttaggttggatattatcataggctcaggcccagcggctcaaaccattaaaattgatttaccccctttcactctcatcggcgctaccaccagagccggaatgctctctaaccccttaagagacagatttggcatgagttttagaatgcaattttataaccctagcgaactggccctcatcattaaaaaagctgccgttaaactcaaccaagacatcaaacaagaaagtgctgatgaaatcgctaaaaggagtagaggcacgccaaggatcgctttaaggcttttaaaaagggtgcgcgattttgcgctagtcaaaaattcaagcttgatggatttaaacatcactttgcatgctttgaatgaattaggcgtgaatgaattaggctttgatgaagcggatttggcgtatttatctttgttggctaacgctcaaggaaagccggtgggtttgaacacgattgcagcatctatgagagaagatgaaggcacgattgaagacgtgattgagccttttttactcgctaatggttatttagagcgcaccgctaaaggcagaatcgccacgcctaaaacccatgagctcttaaaaatccccactttaaacccccaaactttattttaatcttgtttagaaagaaaattacactacaataacgataaaattttaaagggtgtaaaagtagattgttatgtt

SEQ ID NO: 128 - protein, 336 aa, Helicobacter pylori
MKERIVNLETLDFEISQEVSLRPSLWEDFIGQEKIKSNLQISICAAKKRQESLDHMLFFGPPGLGKTSISHIIAKEMETNIKITAAPMIEKSGDLAAILTNLQAKDILFIDEIHRLSPAIEEVLYPAMEDFRLDIIIGSGPAAQTIKIDLPPFTLIGATTRAGMLSNPLRDRFGMSFRMQFYNPSELALIIKKAAVKLNQDIKQESADEIAKRSRGTPRIALRLLKRVRDFALVKNSSLMDLNITLHALNELGVNELGFDEADLAYLSLLANAQGKPVGLNTIAASMREDEGTIEDVIEPFLLANGYLERTAKGRIATPKTHELLKIPTLNPQTLF

SEQ ID NO: 129 - DNA, 989 bp, Helicobacter pylori
  CDS (111)...(869)
agtttccaatgaagaagccttaaacaaagaagtttcaagcgatgaatcccctaaagaagtccaattagcaaccgataacaacaccaaagaacacgacaaagaaaaagagaatgtttgaagatttaaaaccgcatttacaggaattaagaaagcgtttgatggtttctgtaggaacgattctagtggcgtttttggggtgctttcatttttggaaaagtatttttgaatttgttaaaaattcctataaaggcacgctcattcagctctcccctattgaaggggtcatggtagcggttaaaatcagtttttcagccgctatcgtcatttccatgcccattattttttggcaattatggctctttatcgctccagggctttacaagaatgaaaaaaaagtgattttgccttttgtgttttttgggagtgggatgtttttgattggggcggcgttttcttattatgtggtgttccctttcattattgaatacttagccacttttgggagcgatgtgtttgcggctaatatttctgcgtccagttacgtgagctttttcacgcgcttgattttaggctttggcgtggcgtttgaattgcctgttttggcgtattttttggctaaagtgggcttgattactgatgcgagcttgaaagcgtattttaaatacgctattgtagtgatttttattgtagcagccattatcactccccctgatgtggtgagtcaaatctttatggcgttgcccttagtggggctttatgggctttctattttaatcgccaaaatggtcaatccggctcccaaagataacgaaaataacaacgaaaataataacgaaaataacaccaaagagaatacaaagagcgagtcgtagttgaaagaatttgatttagaaagctatgattattatttgcctaaggaattgatcgcaagctaccccgttttgcccaaagaaaaggctaaattactcgtctatgaaaggcgttcgcaa

SEQ ID NO: 130 - protein, 253 aa, Helicobacter pylori
MFEDLKPHLQELRKRLMVSVGTILVAFLGCFHFWKSIFEFVKNSYKGTLIQLSPIEGVMVAVKISFSAAIVISMPIIFWQLWLFIAPGLYKNEKKVILPFVFFGSGMFLIGAAFSYYVVFPFIIEYLATFGSDVFAANISASSYVSFFTRLILGFGVAFELPVLAYFLAKVGLITDASLKAYFKYAIVVIFIVAAIITPPDVVSQIFMALPLVGLYGLSILIAKMVNPAPKDNENNNENNNENNTKENTKSES

SEQ ID NO: 131 - DNA, 655 bp, Helicobacter pylori
  CDS (31)...(600)
gtgcattatttaagaattttaatactgagtatgagttttttaaatattttaaatgctgaaaatttgagttatatgtcttcttcttatcaaataggcacggtgtttatgcgccctttaaacaccaacaagcttttacaaggggcttcaatccttcaaggctatgaagtgaatcctaaaaacgattgggcttattctaggtattatttctttatagattatggcaatgtgctttttaataatgactctactttacaagcgaacatgttcacttatggggtgggaggggattttatggtcgcctacgctaaaaaccctatcaaccgctgggcttttttctttggcttgcaactggccgctaacacatggatactcaacaataaagtcaaagatttggtggtgaatacttgggattcattaaaagatttcaattttcacaacacttatttcagggctattgggaagtttggggtgcagtttcgcacgatcgttttgtatcataaggtggatgtagaaattggcatgaaaatctttctaactcctgaaaggcgcagtttgtttgaaaggagctttttgttttttgtttcgcattcgtggcatttttaaatggcggagagagagggattcgaaccctcgaaggcttgcaccttacacgcgt

SEQ ID NO: 132 - protein, 190 aa, Helicobacter pylori
MSFLNILNAENLSYMSSSYQIGTVFMRPLNTNKLLQGASILQGYEVNPKNDWAYSRYYFFIDYGNVLFNNDSTLQANMFTYGVGGDFMVAYAKNPINRWAFFFGLQLAANTWILNNKVKDLVVNTWDSLKDFNFHNTYFRAIGKFGVQFRTIVLYHKVDVEIGMKIFLTPERRSLFERSFLFFVSHSWHF

SEQ ID NO: 133 - DNA, 830 bp, Helicobacter pylori
  CDS (31)...(714)
aaagcactatattaagattaggatcatttaatggcagataaagaaatactgatttttgtagaaggtccaagcgataaggtgtttttagaagtttatctgtattttctagaaagatttccaatcaaaaactttaaagtgcaaaatgtagatggaaaagataacctgtctaaacgattgcttgaaattgaaaaatacgataaaacacttatcatttttgatgcggataaagactatgagagtaataaaaaagagattttaaaaattgtatcagaatcgaaacaaactatttcagaagaacaaatttttttatttcctaataatcaagatgatggcgatttagaaaccctattattaaagattgctaaccacaaagagttcataaattgttttgaaagctatttggattgtattaaaaagaaagaacattacaaaccgattaaaaacataagaaaaagtaagtggtatgcctatttagaagcgcttggattagaaaaatttttccaatacacatgggacacaaagaaaaagaataataaaaaaaagcttatcattgacgataaagatggagatgagattgagataaaagatcaatataaaggagattatgaagaactaaaaaaagttcttgatcttaactcaaaatctcttattccccttaaaaattttttagggcaatttgcagaaaataatcaaaaaacaaatcctaaaattttctaatttaacaaaatatattacaattaccaaaaaagtattatttttcttaaaaggtgcgctgtgaaattgtggtttccttattttttagcgattgtgttcttgcatgcattgggttt

SEQ ID NO: 134 - protein, 228 aa, Helicobacter pylori
MADKEILIFVEGPSDKVFLEVYLYFLERFPIKNFKVQNVDGKDNLSKRLLEIEKYDKTLIIFDADKDYESNKKEILKIVSESKQTISEEQIFLFPNNQDDGDLETLLLKIANHKEFINCFESYLDCIKKKEHYKPIKNIRKSKWYAYLEALGLEKFFQYTWDTKKKNNKKKLIIDDKDGDEIEIKDQYKGDYEELKKVLDLNSKSLIPLKNFLGQFAENNQKTNPKIF

SEQ ID NO: 135 - DNA, 1349 bp, Helicobacter pylori
  CDS (78)...(1298)
aagaacaaattgagcctgctaccgctctcactcaatggccgcaaaaacaagaaaagaaaaaatcataaggaaaaaatatggcaaaaagtattgaattgcaagagatagaagtgtgggatggcaataccgctagttctaacgctttaagacaggctcaaattgatgtcatcgcagcctatcctatcaccccatcaacgcccattgtgcaaaattatggctcgtttaaggataatggctatgttgatggcgaattcgttttagtggaatctgagcatgccgccatgagcgcatgcgtgggagctgccgcagctggagggagagtcagcactgcgactagctctcaaggtttggcgttaatggtagaggttttataccaggcttctggaatgcgtttgcctatcgttttgaatttagtcaatcgtgctttagcagcccctttgaatatccatggcgatcattctgatatgtatttaagcagggattctggttggataagtttatgcacatgcaacccccaagaagcttatgatttcactttaatggcgtttagaatcgcagagcatcaaaaggtgcgcgtgcctactattgtcaatcaagacgggtttttatgctcgcacaccgtgcaaaatgtccgccctttgagcgatgcagtggcttaccaattcgtgggcgaataccaaaccaagcattcccttttggattttgataaaccggtaagctatggcgcgcaagctgaagaagaatggcattatgagcataaagcccaactccaccatgccatcatgagcgcgtcttctgtgattgaagaagtgttcaatgatttcgctaaactcacaggcaggcaataccatttaaccaaaactttccagctagaagacgctgaaatcgctatctttgcgttaggcactacttatgaatcagcgatcgtagcggctaaagaaatgcgtaaaaaaggcattaaggccggcgtggctaccatccattccttgcgccccttcccttatgaaagattagggcaggatttgaaaaatcttaaagctttagcgattttagacaagagctctccagcgggcactatgggggcgatgtttaatgaagtaacgagcgcggtgtatcaaacgcaagggactaaacaccccgtggtgtctaactacatttatggtttaggcgaaagggatatgacgatcgcgcatttatgcgaaatttttgaagaaatcaatgaagacgctcttaaaggcacgctcacgcaccctacccaacaattcgtaggcttgcacggccctaaaatgagctttttttaaaaaggaaatatcatggtaaaagaagtcaaaacactcaaaggttttagc

SEQ ID NO: 136 - protein, 407 aa, Helicobacter pylori
MAKSIELQEIEVWDGNTASSNALRQAQIDVIAAYPITPSTPIVQNYGSFKDNGYVDGEFVLVESEHAAMSACVGAAAAGGRVSTATSSQGLALMVEVLYQASGMRLPIVLNLVNRALAAPLNIHGDHSDMYLSRDSGWISLCTCNPQEAYDFTLMAFRIAEHQKVRVPTIVNQDGFLCSHTVQNVRPLSDAVAYQFVGEYQTKHSLLDFDKPVSYGAQAEEEWHYEHKAQLHHAIMSASSVIEEVFNDFAKLTGRQYHLTKTFQLEDAEIAIFALGTTYESAIVAAKEMRKKGIKAGVATIHSLRPFPYERLGQDLKNLKALAILDKSSPAGTMGAMFNEVTSAVYQTQGTKHPVVSNYIYGLGERDMTIAHLCEIFEEINEDALKGTLTHPTQQFVGLHGPKMSFF

SEQ ID NO: 137 - DNA, 948 bp, Helicobacter pylori
  CDS (1)...(855)
aaaattgaagttttaaggggttttttgaaacgagcgttatacttaattttagggcttttttacacgcttaatgcagagagctttaaagatgttttgactaaagtggattacactttttttaataaaaaggtggtttcgcccatcaaacgctatgcggatagatcggcgttttatctggggcttgggtatcaattagggagcattcagcacaactctagcaacttgaatttatcccagcaattcaataagagtcagattattttcagcgatagtctaagccctgtttttaaaaattcgtatgtgtctaatggccttggcgtgcaagtgggctataagtgggtgggtaagcatgaagagacgaaatggtttggcttcaggtgggggctgttttatgatttgagcgcctctctttatggccaaaaagaatcacagtctgtcatcatttccacttacggcacttatatggatttattattgaacgcttataatggggataagttttttgctgggttcaatctggggattgcttttgctggagtgtatgacaaagtgagcgatgcgttattgtatcaagcccttcttttagacacttttggcgggaaagtggatccaaatggcttccagtttttggtaaatttaggggttcgtttagggaataagcacaaccaatttggctttgggattaaaatccctacttattattttaaccattattattccatgaataacattagcaataatagtgaagatgtcctcaaagttttacgatttttagaatacgggatcaacagcttgttataccaagttgatttcaggcgcaattactcggtttatttcaactacacttatattttttaagcgatagcgtttaaagcgttcttaattgagcgatttcgtctctcaaacgcatcgcttcttcaaaatccaaattcttcgtgcattctcgca

SEQ ID NO: 138 - protein, 285 aa, Helicobacter pylori
KIEVLRGFLKRALYLILGLFYTLNAESFKDVLTKVDYTFFNKKVVSPIKRYADRSAFYLGLGYQLGSIQHNSSNLNLSQQFNKSQIIFSDSLSPVFKNSYVSNGLGVQVGYKWVGKHEETKWFGFRWGLFYDLSASLYGQKESQSVIISTYGTYMDLLLNAYNGDKFFAGFNLGIAFAGVYDKVSDALLYQALLLDTFGGKVDPNGFQFLVNLGVRLGNKHNQFGFGIKIPTYYFNHYYSMNNISNNSEDVLKVLRFLEYGINSLLYQVDFRRNYSVYFNYTYIF

SEQ ID NO: 139 - DNA, 1840 bp, Helicobacter pylori
  CDS (35)...(1735)
aaattttaagcgtaactgattgaaaggaaaacagatgagacggagttttttgaaaacgattggcttgggtgtgatagcactctttttgggtttgttaaaccctttgagtgcggcgagttacccccccattaaaaacactaaagtaggcttagccctttctagccacccgctagctagtgagatcgggcaaaaggttttagaagagggaggtaatgcgattgatgcggctgtagcgataggttttgctcttgcggttgtccatccggcagcaggcaatattggtggaggcggttttgcggttatccatttggctaatggtgaaaatgttgcgttagattttagagaaaaagcccccttaaaagccactaaaaacatgtttttagacaagcaaggcaatgtagtccctaaactcagcgaagatggctatttggcggccggggttcctggaacggtggcaggcatggaagcgatgctgaaaaaatacggcactaaaaaactatcgcaactcattgatcctgccattaaattggctgaaaatggttatgcgatttcacaaagacaagcagaaaccctaaaggaagcaagggagcggtttttaaaatacagttctagcaaaaagtatttttttaaaaaaggccatcttgattatcaagaaggggatttgtttgtccaaaaagatttagccaagactttgaatcaaatcaaaacgctaggcgctaaaggcttttatcaagggcaagtcgctgagcttattgagaaagacatgaaaaaaaatggagggattatcactaaagaagatttagccagttacaatgtgaaatggcgcaaacccgtggtagggagttatcgtgggtataagatcatttctatgtcgccgccaagttcgggaggcacgcatttgatccagattttaaatgtcatggaaaatgcggatttaagcgcccttgggtatggggcttctaagaatatccatatcgctgccgaagcgatgcgtcaggcttatgcggatagatcggtttatatgggagacgctgattttgtttcggtgccggtggataaattgattaataaagcgtatgccaaaaagatttttgacactatccagccagatacggttacgccaagctctcaaatcaaaccaggaatggggcagttgcatgaggggagcaataccacgcattattctgtagcggacaggtgggggaatgcagtcagcgttacttacaccattaacgcttcttatggaagcgctgccagtattgatggggcaggatttttattgaacaatgaaatggatgatttttccatcaagccagggaatcccaatctctatggtttagtagggggcgatgcgaatgcgattgaagccaataagcgccctttaagctccatgtcgcctacgattgtgttgaaaaacaataaggtttttttggtggtgggaagccctggagggtctaggattatcactacggtgctgcaagtgatttctaatgtcattgattataatatgaatatttctgaagcggtttcagccccaagatttcacatgcaatggctccctgatgaattaaggattgaaaagtttggcatgcccgctgatgtgaaagacaacctcactaaaatgggctatcaaatcgttactaagccggtcatgggtgatgtgaatgcgatccaagttttgcctaaaactaaagggagcgttttctatggttcaacggatccaaggaaagaattttaattctttgtcatatacaggtttttaatcctatttagccttattttttgggatggaggggggctttttagcgagaaaatcttaaatttagttttaaaattcata

SEQ ID NO: 140 - protein, 567 aa, Helicobacter pylori
MRRSFLKTIGLGVIALFLGLLNPLSAASYPPIKNTKVGLALSSHPLASEIGQKVLEEGGNAIDAAVAIGFALAVVHPAAGNIGGGGFAVIHLANGENVALDFREKAPLKATKNMFLDKQGNVVPKLSEDGYLAAGVPGTVAGMEAMLKKYGTKKLSQLIDPAIKLAENGYAISQRQAETLKEARERFLKYSSSKKYFFKKGHLDYQEGDLFVQKDLAKTLNQIKTLGAKGFYQGQVAELIEKDMKKNGGIITKEDLASYNVKWRKPVVGSYRGYKIISMSPPSSGGTHLIQILNVMENADLSALGYGASKNIHIAAEAMRQAYADRSVYMGDADFVSVPVDKLINKAYAKKIFDTIQPDTVTPSSQIKPGMGQLHEGSNTTHYSVADRWGNAVSVTYTINASYGSAASIDGAGFLLNNEMDDFSIKPGNPNLYGLVGGDANAIEANKRPLSSMSPTIVLKNNKVFLVVGSPGGSRIITTVLQVISNVIDYNMNISEAVSAPRFHMQWLPDELRIEKFGMPADVKDNLTKMGYQIVTKPVMGDVNAIQVLPKTKGSVFYGSTDPRKEF

SEQ ID NO: 141 - DNA, 719 bp, Helicobacter pylori
  CDS (76)...(630)
tgcaacacttgtatccttcaagcgaacaagctaaaatggcgcaaaaaatcttagaaaacaaggagaaacaccaccatgcaaaaccatgatttagagtcaatcaaacaagccgctttgattgaatatgaagtgagagaacaaggctctagtattgtgctagacagcaatatttccaaagagcctttagagtttattataggcactaatcaaatcatagcagggttagaaaaggcggtattaaaggctcaaattggcgagtgggaagaggttgtcatcgccccagaggaagcttatggggtttatgaaagcagctatttgcaagaagtccctagagatcaatttgaaggcattgaattagaaaaaggcatgagcgtttttgggcaaactgaagacaatcaaaccattcaagccattatcaaagactttagcgctacgcatgtgatggtggattataaccacccgttagccgggaaaactttagcgtttcgtttcaaggttttaggttttagggaagtgagcgaagaagaaattttagcttcacaccatggcggtgggacaggttgctgtggcggtcatgggggtcatggcggaaagaaaggtgggggttgtggttgctcatgttcgcatgggtagtaaggtataggagtatttaaaaggcaaggtcatgaatagttctaatctcaaaaattggctattccctaccatttgcttttttttat

SEQ ID NO: 142 - protein, 185 aa, Helicobacter pylori
MQNHDLESIKQAALIEYEVREQGSSIVLDSNISKEPLEFIIGTNQIIAGLEKAVLKAQIGEWEEVVIAPEEAYGVYESSYLQEVPRDQFEGIELEKGMSVFGQTEDNQTIQAIIKDFSATHVMVDYNHPLAGKTLAFRFKVLGFREVSEEEILASHHGGGTGCCGGHGGHGGKKGGGCGCSCSHG

SEQ ID NO: 143 - DNA, 339 bp, Helicobacter pylori
  CDS (1)...(336)
atctcttctaagcgtttggagatttcaagacttttggagcgtaaaaatgaacgcagttttttagccgaaaaataccacaaaatccccacaaataaaaggaaatttaaagaacgctctataatatctgtttgtgaaatatccaatccagtagcgcacaaagggcttaaaaggatcaaaaaccctaacaccattttaactacaaacattcatcaactccctaaacccatagccacacgcttgtttaactcgtcttcaaataccggcatttgcgcttgcaactgctcttttagcgcttgcttttcattttgtaattgcttcgcaaacgcttcaaactcttga

SEQ ID NO: 144 - protein, 112 aa, Helicobacter pylori
ISSKRLEISRLLERKNERSFLAEKYHKIPTNKRKFKERSIISVCEISNPVAHKGLKRIKNPNTILTTNIHQLPKPIATRLFNSSSNTGICACNCSFSACFSFCNCFANASNS

SEQ ID NO: 145 - DNA, 1440 bp, Helicobacter pylori
  CDS (34)...(1338)
taatctataccaaatagtaaggagttatctaacatggggtttttcaagcttaaagaacacaacactaacattgccaccgagtttagagcgggtttaacgacctttatcaccatgatttacatcgtgcccttaaacgctcttatcctttctcaagccaacatgccttatgaagcccttttaagtgcaacggccattatcactatcttatcgagcgtgtttaacggattgtgggcaaacacccctatcgctatgagcgtgggcttagggctgtcagcttattttagcttcgggttggttcaagggttaaaactcccttggcagagcgctttaggcatcgtagcgctctcgggagcgatttttgtgattttgtctttcactaaatttagaagttgggtcatgcgaagcattcctagcgatttaaggcgtgcggtgagtgcggggataggggcttttatcgcgtttattggccttaaagaaatgcatatcgtcgttacccataargctacgcttgtaaccttaggcgattttggcgatccgcatgtgttattgggggttgtggggatcattctaactttcgcgctctacacgctcaaaatcaggggttctttcattatagcggtcttaatcacttccattctcgcatgggttttaaagctagccccttaccctagcgagtttttttccatgcccgctagcattggccctatcgcctttcaattagactttaagggcattttttttgatgcgagtggggctttcactttagcgttagtgccagttattatcactttttttgtaaccgatttgtttgattctttaggcacgcttgcagggattggccacaagactgattttttcaatgatgaagaaaaaaacaaggaattggaaaagactttggaagcggatgcggtggcttctttagggagcgcggtggtgggcgtttctactacgaccgcttttatagagagcgcgagtggggttgaagaggggggccgcacagggcttacagcggtttttaccggattattttttgttttaacgctcttttgcttgcctcttttaaaagctattcctagcaatgcgatttatccggtgctggtggtagtaggggttttgatgtttagcgtgttagagggggtgaattttaaagacatggccattagcgtttccacttttttaaccgtggtgatgatgcccttaaccttctccattgccgatggcttagcctttggctttttgtcttatagtatcatcaaattggttcaaaaagacttcaaagcactcaattcaggcattatcattctctgcatcatttctgtttctgtatttatctttcgttaagctctttttaaggggctttgcattttttactcatttcatgcctctttttctttatttagacagattattatcttaaaataattgtaatatcattattat

SEQ ID NO: 146 - protein, 435 aa, Helicobacter pylori
  VARIANT 156: Xaa = Any Amino Acid
MGFFKLKEHNTNIATEFRAGLTTFITMIYIVPLNALILSQANMPYEALLSATAIITILSSVFNGLWANTPIAMSVGLGLSAYFSFGLVQGLKLPWQSALGIVALSGAIFVILSFTKFRSWVMRSIPSDLRRAVSAGIGAFIAFIGLKEMHIVVTHXATLVTLGDFGDPHVLLGVVGIILTFALYTLKIRGSFIIAVLITSILAWVLKLAPYPSEFFSMPASIGPIAFQLDFKGIFFDASGAFTLALVPVIITFFVTDLFDSLGTLAGIGHKTDFFNDEEKNKELEKTLEADAVASLGSAVVGVSTTTAFIESASGVEEGGRTGLTAVFTGLFFVLTLFCLPLLKAIPSNAIYPVLVVVGVLMFSVLEGVNFKDMAISVSTFLTVVMMPLTFSIADGLAFGFLSYSIIKLVQKDFKALNSGIIILCIISVSVFIFR

SEQ ID NO: 147 - DNA, 843 bp, Helicobacter pylori
  CDS (66)...(764)
gctcactttttgggattaagccccctagattatggcaaaaacttattaaactttaaaggacaaccatgacccctcacatcaacgccaaaatcggcgatttttatcctcaatgccttttatgcggcgatcccttaagggtgagctacattgcaaaaaaattcttacaagacgccaaagagatcacgaatgtgcgtaacatgctaggctttagcgggaagtataagggtagggggatttctttaatggggcatggcatgggcattgcgtcatgcacgatttatgtaaccgaactcattaaaacctatcaggttaaagagcttttaaggattggcacttgcggggcgattagcccaaaagttggcctgaaagacattatcatggcgacgggggcttcaacggattctaaaaccaatcgggtgcgttttttaaaccacgatttgagcgcaacgcctgattttgaattgagtttaagagcgtatcaaacagcaaagcgtttgggtattgatttgaaagtgggcaatgttttttcaagcgattttttctattcttttgaaacgcatgcctttgatttaatggctaaatacaaccacttggctattgaaatggaagcggcggggttatacgccacggcgatggaactaaacgctaaggctttatgcttatgctcagtctcagatcacttaatcactaaagaagccttaagccctaaagaaagggtagaaagctttgataacatgataattttggctttggagatgatgagttagccttttttgcccccataagttaaggataaaatttaaaggaaaacccttaaagctaaaagccttaagggaactttgg

SEQ ID NO: 148 - protein, 233 aa, Helicobacter pylori
MTPHINAKIGDFYPQCLLCGDPLRVSYIAKKFLQDAKEITNVRNMLGFSGKYKGRGISLMGHGMGIASCTIYVTELIKTYQVKELLRIGTCGAISPKVGLKDIIMATGASTDSKTNRVRFLNHDLSATPDFELSLRAYQTAKRLGIDLKVGNVFSSDFFYSFETHAFDLMAKYNHLAIEMEAAGLYATAMELNAKALCLCSVSDHLITKEALSPKERVESFDNMIILALEMMS

SEQ ID NO: 149 - DNA, 1440 bp, Helicobacter pylori
  CDS (79)...(1407)
tacattaaacttttattatcaatcctacttcctcaaattgatgacaaaagttgggcattttcttgtaaaataacccgcatgtttaagaaaatttttccattagcgttagtgtcatcgttgcggtttttggggctttttattgttttgccggtcattagtttgtatgcggatagtttccattcaagcagtcccttactcgtggggttggctgtgggcggagcgtatcttacgcaaattgtttttcaaacccccatgggcattcttagcgataagataggccgtaaagtggtggttatggtgtgcttgctgttgtttttagccggctcgttagtgtgctttatagcgaatgatattgtttggctcgttatagggcgcttcattcaaggcatgggggctttagggggggttattagtgcgatggtggcggatgaagtgaaagaagaagagcgcaccaaagccatggccatcatgggagcgtttattttcattagcttcactataagcatggcgattggccctggggttgtagcgtttttggggggggcaaaatggctctttttactcacggcgatcttaactttattgagtttattgatgcttttaaaagtcaaagacgcccctaaaatttcttaccagatcaaaaacataaaagcttaccaacccaactctaaagccttgtatcttttgtatctaagctctttttttgaaaaagcgttcatgacgcttatttttgtgctgatccctttagccttagtgaatgaatttcataaagatgaaagctttttaatcttggtgtatgtgcctggagccttattaggggtcttaagcatgggaatagcgagcgttatggctgaaaaatacaacaagcctaaaggagtgatgctttctggcgtattattgtttattgtgagttatttgtgcttgtttttagccgactctagctttttagggaaatatttatggctttttattgttggggtggcgtttttctttattggttttgccaccttagagcctatcatgcaatctttagcgtctaaattcgccaaagtgcatgaaaaaggcaaggttttagggcaattcactacttttggctatttagggagctttgttgggggcgtgagcggggggttgagctaccatcatttaggcgtttctaacacaagcttgatcgttgtagctttagggcttatttgggggctatcgctctttttactcaacaacccttccaagcaaaaaaatgtctatttccccttagacgcttacaatgaggaacaatttgaaactttagaggataaaatcattgaatggtatgttaatattagcgaagaaatcattattgtgaaatataattccgatcacattagcgaagaagaaatcattcacttagcgcaaaactttagaaaataaaacaattaaggatcaaaaatggcctatgaa

SEQ ID NO: 150 - protein, 443 aa, Helicobacter pylori
MFKKIFPLALVSSLRFLGLFIVLPVISLYADSFHSSSPLLVGLAVGGAYLTQIVFQTPMGILSDKIGRKVVVMVCLLLFLAGSLVCFIANDIVWLVIGRFIQGMGALGGVISAMVADEVKEEERTKAMAIMGAFIFISFTISMAIGPGVVAFLGGAKWLFLLTAILTLLSLLMLLKVKDAPKISYQIKNIKAYQPNSKALYLLYLSSFFEKAFMTLIFVLIPLALVNEFHKDESFLILVYVPGALLGVLSMGIASVMAEKYNKPKGVMLSGVLLFIVSYLCLFLADSSFLGKYLWLFIVGVAFFFIGFATLEPIMQSLASKFAKVHEKGKVLGQFTTFGYLGSFVGGVSGGLSYHHLGVSNTSLIVVALGLIWGLSLFLLNNPSKQKNVYFPLDAYNEEQFETLEDKIIEWYVNISEEIIIVKYNSDHISEEEIIHLAQNFRK

SEQ ID NO: 151 - DNA, 1360 bp, Helicobacter pylori
  CDS (89)...(1237)
gaaatcaaaaaaggggtttttaccacttataaagagaaaaaccctatcgctttgaaaacttaaccaataaataaggtaaaattaagacatgcatgcagaatttttcactttcgcgctcatcatgcttttaattgtgatggccccttatatgtctagaatctctcgtttgcctatcacggttgtggagattttatttggatctgttggggcgtatgtgggttttattgagcctactaagggctttgaaatcatgtccgaaattggctttttgtttttaatgtttttatgcggtttggaagtggagatttatctgttcaaaaaattaggggtttctcttttaaaacgcatttttgcttatctgttgattttatacacgctttcgtttattcttacttttagccttaatttagagcctatttttatggtgattttccctattattagtttgggcatgatcatgactttagtcaaagattatcgtaaagagattttgtggcttgatttggttttgaaagtgggcgttattggggaattgttaagcatttttggtttggtggtcgtggatggggtgtattcgcatggtttgggcatggatttgattaaagatttaggcattctcattgtttttttaatcttaattatcgtggcgtttcaaatctttaagactttgttttggtggttcccgcatttaaagctttttgtgatgcctaaaagcagtcagtttaaccaagatgtgcgtttttcgctcatgctctttttttccttagttgcgatcgtggtgtggctcaaaatagaaatggttttaggggcgtttctagcagggttagtcgtttctacttttttccctcataaatcagaattgatccacaagctcaatgatgtgggttttgggttttttgtgcctttgtttttcatccatgtaggctctactttagacttaaaattagtgtttttaaacccgcatttgattctccaagggatattgattgtcatagcgatgttgagtttgcacttgatcacttcaaccttattgtggcgcaaatactttaaagaggctaagcatttattttcattcgctttaggggcttctatgcctttaacttttttagtaaccaccgcagcagtaggcttaaaagcgcaagcgatctcacaaaacacctactacgcattgctcatggcggctatttttgaaggggtattattcacgattgcgatcaaaatactcaacaaaaaagcttgaatgaaagcttaagcgtctaaatatttagcgtcgctaaagctgttcgcttgaacattattgaacgcattctctaagctatcaaagaaacgagggtgcaagttttgcatttcttttaagaaa

SEQ ID NO: 152 - protein, 383 aa, Helicobacter pylori
MHAEFFTFALIMLLIVMAPYMSRISRLPITVVEILFGSVGAYVGFIEPTKGFEIMSEIGFLFLMFLCGLEVEIYLFKKLGVSLLKRIFAYLLILYTLSFILTFSLNLEPIFMVIFPIISLGMIMTLVKDYRKEILWLDLVLKVGVIGELLSIFGLVVVDGVYSHGLGMDLIKDLGILIVFLILIIVAFQIFKTLFWWFPHLKLFVMPKSSQFNQDVRFSLMLFFSLVAIVVWLKIEMVLGAFLAGLVVSTFFPHKSELIHKLNDVGFGFFVPLFFIHVGSTLDLKLVFLNPHLILQGILIVIAMLSLHLITSTLLWRKYFKEAKHLFSFALGASMPLTFLVTTAAVGLKAQAISQNTYYALLMAAIFEGVLFTIAIKILNKKA

SEQ ID NO: 153 - DNA, 1024 bp, Helicobacter pylori
  CDS (115)...(921)
agttggcaaaaacgcagagacagtaacgcaaaggcaaataaagagactcattttaaacaagcgaatgccattacaaatataatcagatcagttggtgggttttttacaaagattatgaagagagttagagaacttgtaaaaaaacatcccgagaaaagcagtgtggcattagtagtattaacccatgctgcatgcaagaaagcgaaagaattggacgataaagtccaggataaatccaaacaagctgaaaaagaaaatcaaatcaattggtggaaatattcaggattaacaatagcgacaagtttattattagccgcttgtagtgttggtgatattgataaacagatagagttagaacaagaaaaaaaggaagctgaaaacgctagggatagagcgaacaagagtgggatagaactggaacaggaaaaacaaaagaccattaaagaacaaaaagatttagttaaaaaagcagaacaaaattgccaagaaaatcatggccaattctttatgaaaaaattaggaattaagggtggcattgctatagaagtagaagctgaatgcaaaacccctaaacctgcaaaaaccaatcaaacccctatccagccaaaacacctccccaactctaaacaaccccactctcaaagaggatcaaaagcgcaagagcttatcgcttatttgcaaaaagagttagaatctctgccctattcacaaaaagctatcgctaaacaagtgaatttttacaggccaagttctgtcgcttatttagaactagaccctagagattttaaggttacagaagaatggcaaaaagaaaatctaaaaatacgctctaaagctcaagctaaaatgcttggaaatgagaaacccacaagcccacctttcaacctctcaaagccttttgttcgttcaaaaaatatttgctgatgttaataaagaaatagaagcagttgctaatactgaaaagaaagcagaaaaagmgggttatggttatagtaaaaggatgtaggcataagaaaataagaac

SEQ ID NO: 154 - protein, 269 aa, Helicobacter pylori
MKRVRELVKKHPEKSSVALVVLTHAACKKAKELDDKVQDKSKQAEKENQINWWKYSGLTIATSLLLAACSVGDIDKQIELEQEKKEAENARDRANKSGIELEQEKQKTIKEQKDLVKKAEQNCQENHGQFFMKKLGIKGGIAIEVEAECKTPKPAKTNQTPIQPKHLPNSKQPHSQRGSKAQELIAYLQKELESLPYSQKAIAKQVNFYRPSSVAYLELDPRDFKVTEEWQKENLKIRSKAQAKMLGNEKPTSPPFNLSKPFVRSKNIC

SEQ ID NO: 155 - DNA, 535 bp, Helicobacter pylori
  CDS (51)...(482)
gtgatccctaaagaatatatcctgcggtggataagggtatccaagaagcgatgcaaaatggcgttttggcaggctatccggtggtggattttaaagttaccctttatgatgggagctaccatgatgtggattcttcagaaatggcgtttaaaatcgctggctctatggcgtttaaagaagcgagtcgcgcggctaacccggttttactagagcctatgatgaaagtggaagtggaagtccctgaagaatacatgggcgatgtgattggcgatttgaatagaagaagagggcaaatcaattctatggacgatagattaggcttgaaaatcgtgaacgcttttgtgccgttggtggaaatgtttggctattctacggatttacgatcagccacccaagggcgtgggacttactctatggagtttgatcattatggcgaagtgcctagcaatatcgctaaggaaattgtagaaaagcgcaaaggctgatttaattataacgctctcttatttttagggggtgttataggtgctgttta

SEQ ID NO: 156 - protein, 144 aa, Helicobacter pylori
MQNGVLAGYPVVDFKVTLYDGSYHDVDSSEMAFKIAGSMAFKEASRAANPVLLEPMMKVEVEVPEEYMGDVIGDLNRRRGQINSMDDRLGLKIVNAFVPLVEMFGYSTDLRSATQGRGTYSMEFDHYGEVPSNIAKEIVEKRKG

SEQ ID NO: 157 - DNA, 740 bp, Helicobacter pylori
  CDS (51)...(671)
ctctctcttcaagcttggataacaaatgcggtttgaagagttctaacgccatgtttttaggcaacccgcattcatccattttgagattaggcccaaccacaatcacgcttctgcctgaaaaatccacgcgcttacctaaaaggttttgcctgaaacgcccctgcttgcctttaatgatttcactgagcgattttaaagggcgtttgttagcccctttaaccgcattagtgctgcggccgttatcaaaaagcacatccacggcttcttgcaacatccttttttcattgcgcacaatgatttctggcgctccaagctccattaagcgtttcaagcgttggttacgattgatgacacgacgatacaattcattcacatcgctgactgcaaacttcccgccatctagcgcgactaaaggccttaaatccggtggcaataccggtaaaaccgtgagcatcatccattcaggcctattaccagaatttaaaaagctttctaccactttcaaacgcttaatgagttttttctttttcgcatcagaattggtgtctttcacttcttctttcaaactctgcaataaggtgatcaaatcaatttcttctaacaaatccttgatcgcttcaccgcccatttgcgctacaaagcccctgtcttcgtatcttcgtgagatattttgatactgctcttcattcaaaatatcgtatttcatcacaagcttagtgccttcattgtcataagcggct

SEQ ID NO: 158 - protein, 207 aa, Helicobacter pylori
MFLGNPHSSILRLGPTTITLLPEKSTRLPKRFCLKRPCLPLMISLSDFKGRLLAPLTALVLRPLSKSTSTASCNILFSLRTMISGAPSSIKRFKRWLRLMTRRYNSFTSLTANFPPSSATKGLKSGGNTGKTVSIIHSGLLPEFKKLSTTFKRLMSFFFFASELVSFTSSFKLCNKVIKSISSNKSLIASPPICATKPLSSYLREIF

SEQ ID NO: 159 - DNA, 505 bp, Helicobacter pylori
  CDS (1)...(411)
caatgtggtgagagagattttagagggcttttctttcaagcaatacgagtgtctaattacgctagaaattatcaagtcaaacacaacttggcttactggggggctaaagattatttagggtgcggggctggggctgtgggctgcgtggcgaatgagcgcttttttgcaaaaaaactcatagaaaactacatcaaagaccccctacaacgccaagttgagacgcttaataaacaagacaaacgcttagaaaagctgtttttaggcttgaggtgcgtgcttggggttgagcttagtttcttagatgaaaataaagtaaagtttttgattgaagagaacaaggctttcattaaaaataaccgcttgatagcgagcgattttttcatggccgatgaaatggctttgtggctgttatgattgtaggctttgcttcaatcaagcgttaataaaacgctagaaagcgttttttaatgaatgcctacaaaatttttagccaaaaaccaaccaa

SEQ ID NO: 160 - protein, 137 aa, Helicobacter pylori
QCGERDFRGLFFQAIRVSNYARNYQVKHNLAYWGAKDYLGCGAGAVGCVANERFFAKKLIENYIKDPLQRQVETLNKQDKRLEKLFLGLRCVLGVELSFLDENKVKFLIEENKAFIKNNRLIASDFFMADEMALWLL

SEQ ID NO: 161 - DNA, 1260 bp, Helicobacter pylori
  CDS (55)...(1179)
gttggtgtttgaaaggctctatgaagaagaattaaggcgcaagggttttttataatggtctctctctatttagaaaacgggctttttttgcaagcgcaaagttttggggctagcggcacgcaagcgggcgagcttgtttttaacacttctatgagcggttatcaagaagtcattagcgaccctagctataaggggcaatttgtggtttttagcatgcctgagattggggttgtgggtgctaattctaaagatgatgaatcctttttttcatgcgcaggggttttagcgcgccattacaacgaatttttttctaactcaagggcggattttagcttgagcgcttatttgaaagagcgtggcgttttaggggtttgtggcgttgatactaggagtttgattaaaaccttacgccatcatgggtgcttaatgatggtcgcttccacgatagagcatgacaaaaacaagcttgaagaaattttaaaaaacgctcctaaaatttctcactcccccctagtgtctagcgtttctacgccaaaaataaccacgcaccagcgtgcgacttttgatttcaaaaccctagattacaagccttttgatgaaaaaacctctcataaaattatcgcggtgttagactttggggctaagggcaatattttaaacgagcttcaaaatgtggggttaaaagcccttatttacccgcaccacactaaagctagcgagctgattaaagcctatgaaaaaaaagaaattagcgggattttcctctctaacgggccgggcgatcctttaagcttgcagcaagaaattggcgaaatcaaacaactcattaacgctaaaatccccatgcttggcatttgcttagggcatcaattgctctctatcgctcaaggctaccctacttacaagctcaaatttggtcatcatgggagcaaccaccccgttaaaaacctaaaaacaaacgccgtagaaatcaccgcgcaaaaccacaactattgcgtccctgaagacattgaagaaatcgccattatcacgcaccgcaatctttttgacaacaccattgagggcgtgcgttataaaaacgctcccattatctctgtccagcaccacccagaaagtagcccaggtcctaaagagagccactatatttttaaagaatttgtggaattgttaaaggatttttaggggtttttaaaacagcgcttatagagactgaaaagcgctttaaaaatagatttaaatctttttatcaaaaaatctcgc

SEQ ID NO: 162 - protein, 375 aa, Helicobacter pylori
MVSLYLENGLFLQAQSFGASGTQAGELVFNTSMSGYQEVISDPSYKGQFVVFSMPEIGVVGANSKDDESFFSCAGVLARHYNEFFSNSRADFSLSAYLKERGVLGVCGVDTRSLIKTLRHHGCLMMVASTIEHDKNKLEEILKNAPKISHSPLVSSVSTPKITTHQRATFDFKTLDYKPFDEKTSHKIIAVLDFGAKGNILNELQNVGLKALIYPHHTKASELIKAYEKKEISGIFLSNGPGDPLSLQQEIGEIKQLINAKIPMLGICLGHQLLSIAQGYPTYKLKFGHHGSNHPVKNLKTNAVEITAQNHNYCVPEDIEEIAIITHRNLFDNTIEGVRYKNAPIISVQHHPESSPGPKESHYIFKEFVELLKDF

SEQ ID NO: 163 - DNA, 2790 bp, Helicobacter pylori
  CDS (116)...(2656)
ttctcctttaattttggatgtttaaagtataataaactatctttttaaaaaaataacttaaaagagctataaaatagccttaaaatacgcgataaaacaacaaaaaggaatacccatggatattcgcaacgaatttttacaattttttcaaaataaagggcatgccgtttatcctagcatgcctttagtgcctaatgacgctaccttgctttttaccaatgccggcatggtgcaatttaaagatatttttaccgggattgtgccacgccctagcattcctagagcggcaagctcgcaattgtgcatgcgcgcaggcggcaagcataacgatttggaaaatgtcggttataccgcaaggcaccacacgctttttgaaatgctagggaatttctcttttggggattatttcaaagaagaagcgatcttgtttgcgtgggaatttgtaaccaagaatttagggtttaagcctaaagatttatacatcagcgtgcatgaaaaggacgatgaagccgttaaattatgggaaaagtttgtgcctgttgataggattaaaaaaatgggcgataaagataatttttggcaaatgggcgatagcgggccttgcgggccttgcagtgaaatttacattgatcagggcgaaaaacactttaaggggagcgaggattattttgggggcgagggcgataggtttttagaaatttggaatctggtgttcatgcaatacgaacgctctaatgatggcgttttatcccccttgccaaagcctagcattgatacaggcatgggattagaaagggtgcaagcgctattagaacataagctcaataattttgattcttcattatttgcgcccctaatggaagaaatcagcgagcttacaagcctagattatgcgagcgagttccagccaagctttagggtagtggccgatcacgcaagagcggtagcattcttgctcgctcaaggggtgcatttcaataaggaaggccgtggctatgttttaaggcgcattttaaggcgagccttaaggcatgggtatttaatgggcttgaaagaagcgtttttatacaaagtcgtgggcgtggtgtgcgagcaatttgctaacacgcatgcgtatttgaaagagtctaaagaaatggtggtaaaagaatgttttgaagaagaagagcactttttagagactttggaatcgggcatggaattgtttaacttgtctttaaagcatttgaatgaaaataaaatctttgatggcaagatcgctttcaagctttatgacacttttggtttccctttggatttaacaaacgacatgttaagaagtcatggggcgtgtgcggatatgcaaggctttgaattgtgcatgcaagagcaagtgaaacgctctaaagcttcatggaaaggcaaacaaaacaacgccgattttagcgctattttaaacgcttatgcacctaatgtttttgtggggtatgaaacgacagaatgttctgctaaagttttagggttttttgatagcgattttaaagaaataaccgatgcaaatcctaaccaagaagtctgggtgttgttagaaaaaacccctttttatgcagaaggtggaggggctataggcgataggggcgcgctttttaaagacaatggagaagtggctatcgtgttagatacaaaaaacttttttgggcttaatttttcactccttgaaatcaaaaaagcgctaaaaaaaggcgatcaagtgatcgcgcaagtgagcgatgagcgctttgaaatcgccaaacaccatagtgcgactcatttattgcagagcgctttaagagaagttttaggctcgcatgtgagtcaagcggggagtttagtggaatccaagcgattgcgctttgatttctcgcatgctaaagcgctcaatgatgaagagctagaaaaagtagaagatttagtcaacgctcaaattttcaagcacctaaatagccaggtggagcatatgcctttaaaccaagccaaagataagggagcgttagcgttattcagtgaaaaatacgctgaaaatgtgcgggtggtgagctttaaagaagcgtccattgaattgtgtgggggcattcatgtggaaaatactgggcttattggggggtttaggattgtaaaagaaagcggggtgagtagtggggtcagacgcattgaagcggtgtgcgggaaagccttttaccaactggctaaagaagaaaataaagagcttaaaaacgctaagactttattgaaaaataacgatgtgatcgccggtatcaataagcttaaagagagcgtgaaaaacagccaaaaagcccccgtttctatggatttaccggttgaaaaaatccatggcgtgaatttggtggtgggcgtagtggaacaaggcgacattaaagaaatgattgaccgattgaaaagtaagcatgaaagattgctcgctatggtgtttaaaaaagaaaatgagcgaatcactctcgcatgcggggtgaaaaacgcgcccataaaagcgaatgtgtgggctaatgaagtggcgcaaattttagggggcaaagggggcgggagaggtgattttgcgagcgctggaggcaaggatattgaaaatttgcaagccgcactcaatttagcgaaaaataccgctcttaaagctttagagggatagcatggagcttattttaggctctcaatccagcactagggcgaatctcttaaaagagcatgggattaagtttgaacaaaaagcgctctattttgatgaagaaagcctaaaaaccacagaccctagggagtttg

SEQ ID NO: 164 - protein, 847 aa, Helicobacter pylori
MDIRNEFLQFFQNKGHAVYPSMPLVPNDATLLFTNAGMVQFKDIFTGIVPRPSIPRAASSQLCMRAGGKHNDLENVGYTARHHTLFEMLGNFSFGDYFKEEAILFAWEFVTKNLGFKPKDLYISVHEKDDEAVKLWEKFVPVDRIKKMGDKDNFWQMGDSGPCGPCSEIYIDQGEKHFKGSEDYFGGEGDRFLEIWNLVFMQYERSNDGVLSPLPKPSIDTGMGLERVQALLEHKLNNFDSSLFAPLMEEISELTSLDYASEFQPSFRVVADHARAVAFLLAQGVHFNKEGRGYVLRRILRRALRHGYLMGLKEAFLYKVVGVVCEQFANTHAYLKESKEMVVKECFEEEEHFLETLESGMELFNLSLKHLNENKIFDGKIAFKLYDTFGFPLDLTNDMLRSHGACADMQGFELCMQEQVKRSKASWKGKQNNADFSAILNAYAPNVFVGYETTECSAKVLGFFDSDFKEITDANPNQEVWVLLEKTPFYAEGGGAIGDRGALFKDNGEVAIVLDTKNFFGLNFSLLEIKKALKKGDQVIAQVSDERFEIAKHHSATHLLQSALREVLGSHVSQAGSLVESKRLRFDFSHAKALNDEELEKVEDLVNAQIFKHLNSQVEHMPLNQAKDKGALALFSEKYAENVRVVSFKEASIELCGGIHVENTGLIGGFRIVKESGVSSGVRRIEAVCGKAFYQLAKEENKELKNAKTLLKNNDVIAGINKLKESVKNSQKAPVSMDLPVEKIHGVNLVVGVVEQGDIKEMIDRLKSKHERLLAMVFKKENERITLACGVKNAPIKANVWANEVAQILGGKGGGRGDFASAGGKDIENLQAALNLAKNTALKALEG

SEQ ID NO: 165 - DNA, 720 bp, Helicobacter pylori
  CDS (100)...(636)
tcgcacgccaaagaaaaacacgaaaaaaccgaacacacgcattctcaccacacagaggaagcagaaagcgtaggatctcatagcgaataagggcttatcatgtttaataaagtgattatggtagggcgtttgaccaggaatgtggagttgaaatatttgcctagcggttcggctgcggctacaataggtttagccacaagcaggcgttttaaaaaacaagacggcacgctaggcgaagaggtgtgctttatagatgcgcgtttgtttgggcgaacggctgaaatcgctaaccagtatttgagcaagggttcaagcgttttgatagaagggcgtttgacttatgagagttggatggatcaaacgggcaaaaaaaattcccgccacactatcacagcggactcgttgcaatttatggataaaaagtcagacaatccccaagcaaacgctatgcaagatagtataatgcatgagaattccaacaacgcttatcccgctaatcataacgctcccagccaagatccttttaaccaagcttatgcgcaaaacgcttacgctaaagagaatttacaagcacagccgtccaagtatcaaaacagcgtgcctgaaatcaatattgatgaagaagaaatccccttttaagggttaaaattaaggagacattatggaaagaaaacgctattcaaaacgctattgcaaatacactgaagctaaaatcagctt

SEQ ID NO: 166 - protein, 179 aa, Helicobacter pylori
MFNKVIMVGRLTRNVELKYLPSGSAAATIGLATSRRFKKQDGTLGEEVCFIDARLFGRTAEIANQYLSKGSSVLIEGRLTYESWMDQTGKKNSRHTITADSLQFMDKKSDNPQANAMQDSIMHENSNNAYPANHNAPSQDPFNQAYAQNAYAKENLQAQPSKYQNSVPEINIDEEEIPF

SEQ ID NO: 167 - DNA, 990 bp, Helicobacter pylori
  CDS (91)...(879)
tccaaaacgattgggctgaaattgaattttctcacgaaacaaagggctatgtgtttttaaaacttttaaaaaaggctgaatgaaagaataatgaaattaaaatcttttggggtttttggaaatcccattaagcattccaaatcgcccttaatccataacgcttgttttttaacttttcaaaaagaattaaggtttttggggcattaccaccccatattactccctttagaaagccacatcaaaagcgagtttttgcatttgggattgagtggggctaatgtaaccttaccctttaaagaaagggcgtttcaagtttgcgataaaatcaaaggtatcgcgcttgaatgcggagcggtcaatacgcttgttttagaaaatgatgagcttgtgggttacaataccgacgctttagggttttatctttctttaaagcaaaaaaactatcaaaacgctttgattttaggagctggggggagcgctaaagccctagcgtgtgaattgaaaaaacaaggcttacaagtgagcgtgttgaaccgctcttctaggggattggattttttccaacgcctgggctgtgattgttttatggagcctcctaaaagcgcttttgatttgattattaacgccacttcagcgagtttgcataacgaattgcctttgaataaagaggttttgaaagggtattttaaagagggcaagctcgcttatgatttggcgtatgggtttttaacgccctttttgtctttagccaaagagttaaaaaccccttttcaagacggaaaagacatgctcatctatcaagctgctttaagttttgaaaaattcagcgcttctcaaatcccttattcaaaagcgtttgaagtcatgcgaagtgttttttgatgcaagggtttttaagaagcctgttttttggggttaaaaagatccctaaaccattcgctcctctagtagaaaagggcgttttaaaagaagcgcttgaattgaaaaagg

SEQ ID NO: 168 - protein, 263 aa, Helicobacter pylori
MKLKSFGVFGNPIKHSKSPLIHNACFLTFQKELRFLGHYHPILLPLESHIKSEFLHLGLSGANVTLPFKERAFQVCDKIKGIALECGAVNTLVLENDELVGYNTDALGFYLSLKQKNYQNALILGAGGSAKALACELKKQGLQVSVLNRSSRGLDFFQRLGCDCFMEPPKSAFDLIINATSASLHNELPLNKEVLKGYFKEGKLAYDLAYGFLTPFLSLAKELKTPFQDGKDMLIYQAALSFEKFSASQIPYSKAFEVMRSVF

SEQ ID NO: 169 - DNA, 1080 bp, Helicobacter pylori
  CDS (47)...(1033)
tttttagagagggcgtgtttgatagcgtggatttaaaggagcaagcatgagcgcttatatcattgaaaccctgattaaaattttgattttagtcgctgttttttcggctttaggaggctttgccacttatattgaaaggaaagtgttagcctatttccaacgccgtttagggccttgttatgtggggccttttgggcttttgcaagtcgcagcagacggcattaagcttttcactaaagaagacattatccctcaaggcgcgaacaaattcattttcacgctagcgcccattattgcgatggtgagtgcgtttgtgtccatggcgcctatcccctttttccctaatttcactctgtttggctatgagatcaagccccttatttctgacatcaacattggctttttgtttttcttagccgtgggttcggcagggatttatgcgcctattttagccgggcttgcctctaataacaaatactctttaattggctccgcaagagcgacgatccaactgctcagctttgaagtggtcagcactttaaccattctagcccccttaatggtggtaggatcgctctctttagtggaaatcaatcattaccaaagcggtgggtttttagactggcttgtgtttaagcagcctctagcgtttgttttgtttttgatcgcaagttatgccgaattgaatcgaaccccctttgacttgctagagcatgaagccgagatcgtggcggggtattgcaccgaatacagcggcttgaaatggggcatgttctttttagcggaatacgcgcatttattcgctttttcttttgtgatttctattgtgttttttggcgggtttaacgcatggggctttatccctggaggcatagcgattttgattaaagcgggcttttttgtctttttatccatgtgggttagagcgacttatccgcatgtgcgcccagaccaactgatggatatgtgctggaaaatcatgctgcctttagcgttattgaacattgtgctaacgggcattatcattttaatttaaaggaggttttatggccaaacaagaatacaagcaacttcctaaac

SEQ ID NO: 170 - protein, 329 aa, Helicobacter pylori
MSAYIIETLIKILILVAVFSALGGFATYIERKVLAYFQRRLGPCYVGPFGLLQVAADGIKLFTKEDIIPQGANKFIFTLAPIIAMVSAFVSMAPIPFFPNFTLFGYEIKPLISDINIGFLFFLAVGSAGIYAPILAGLASNNKYSLIGSARATIQLLSFEVVSTLTILAPLMVVGSLSLVEINHYQSGGFLDWLVFKQPLAFVLFLIASYAELNRTPFDLLEHEAEIVAGYCTEYSGLKWGMFFLAEYAHLFAFSFVISIVFFGGFNAWGFIPGGIAILIKAGFFVFLSMWVRATYPHVRPDQLMDMCWKIMLPLALLNIVLTGIIILI

SEQ ID NO: 171 - DNA, 1280 bp, Helicobacter pylori
  CDS (48)...(1226)
taaggataaaatcaagcgattagcccgaattttaagagagtattaagatgaataaaaaagcgtattttggggagtttggagggagttttgtttcggagttgttagtgcctgcattaagagaattagaacaggcgtttgatgcgtgtttgaaagatgaaaaattccaaaaagaatattttcgtcttttaaaggattttgtgggccgtcctagccctttaaccttgtgtcaaaatatcgtttctaaccctaaagtcaagctttatttaaaacgagaggatttaatccatggcggggcgcataagactaatcaagccttagggcaagcccttttagcgaaaaaaatgggtaaaacaaggatcatcgctgaaacaggcgccggtcagcatggcgtggcgacggctatcgcttgcgcattattgaacttaaaatgcgtggtttttatgggatctaaagacatcaagcgccaggaaatgaatgtttttagaatgcacttattaggcgctgaagtgagagaggttaattcagggagcgcgacgcttaaagacgctgtgaatgaagccttaagagattgggcgagcagttacaaggacacgcattatttgctaggcacagccgccgggccacacccttaccccacaatggttaaaacctttcaaaaaatgataggcgatgaggttaaaagccagattttagaaaaagaaaaccgcttgcctgattatgtgatcgcatgcgttggaggggggtctaacgctatagggatattcagcgcatttttaaacgacaaagaagttaaactcataggcgtagagccggcgggtttagggctagaaaccaataagcatggggcgactttgaataaggggcgtgtggggattttgcatgggaataaaacctatcttttacaagatgatgaaggccagattgcagaaagccatagcattagcgccgggcttgattatccaggagtggggccagaacacagctatttaaaagaaagtgggcgtgcggtttatgaaagcgcaagcgatgctgaagcgctagaagccttcaagttgttgtgccaaaaagaaggcattatcccagcgctagaaagctcacacgccttagcgtatgccttaaagctcgctcaaaaatgcgaagaagaaagcatcatcgtagtgaatttaagcggcagaggggataaggatttaagcaccgtttataacgctttaaaaggaggtttaaaatgaggtatcaaaacatgtttgaaaccttaaaaaaacacgaaaaaatggcgttta

SEQ ID NO: 172 - protein, 393 aa, Helicobacter pylori
MNKKAYFGEFGGSFVSELLVPALRELEQAFDACLKDEKFQKEYFRLLKDFVGRPSPLTLCQNIVSNPKVKLYLKREDLIHGGAHKTNQALGQALLAKKMGKTRIIAETGAGQHGVATAIACALLNLKCVVFMGSKDIKRQEMNVFRMHLLGAEVREVNSGSATLKDAVNEALRDWASSYKDTHYLLGTAAGPHPYPTMVKTFQKMIGDEVKSQILEKENRLPDYVIACVGGGSNAIGIFSAFLNDKEVKLIGVEPAGLGLETNKHGATLNKGRVGILHGNKTYLLQDDEGQIAESHSISAGLDYPGVGPEHSYLKESGRAVYESASDAEALEAFKLLCQKEGIIPALESSHALAYALKLAQKCEEESIIVVNLSGRGDKDLSTVYNALKGGLK

SEQ ID NO: 173 - DNA, 559 bp, Helicobacter pylori
  CDS (31)...(513)
caggtagctttgggcgagaaaggagagagcatgaatgtcaaaaatcgtttgagcgattgggaatatcaatgggcagtggctctagtctatacgatatgtatctccataaacgctaggattttttatgacatagatggttcagctagcgattcgatttttgaccctaaaaatagctattatatgtggctagtgggtctaatagcggctttgttgtctaaccttttatttgacccacgaggtagggattgttataaatctttccaagtaagataccctaggtttctcaaagccatttttaaggctaggttttttggcgcgttttataacgctgtgttaggatcaaggctaagggatttttatgtgatgcttttaacgataccctttattgccgctatccatgaggtttcggcgtattacgggcatcctagcaacttccttatagagggtttggtcattcttggccttgtgtgtgtttttgggatttgttctaggctttgcgctaaattagggtggtgatttaactcaaatagcattaaatggaggggggagtaaaaaatta

SEQ ID NO: 174 - protein, 161 aa, Helicobacter pylori
MNVKNRLSDWEYQWAVALVYTICISINARIFYDIDGSASDSIFDPKNSYYMWLVGLIAALLSNLLFDPRGRDCYKSFQVRYPRFLKAIFKARFFGAFYNAVLGSRLRDFYVMLLTIPFIAAIHEVSAYYGHPSNFLIEGLVILGLVCVFGICSRLCAKLGW

SEQ ID NO: 175 - DNA, 810 bp, Helicobacter pylori
  CDS (53)...(712)
tgagatcaaacccgtagaacttgtcaaggtaattcttgcgtaaggaaatagcatgttaataaccacccaactatccaaacgattttacgccacactcgctctttcttgcgtgtttttaaccatcactaacattcttgtcaaaggctcgtttatcaatcttttagcagggcttagtggggttttgtatgcgttttttgccggagaaaggcaaacgatttgctttgtgtttggtcttgtttataatttgagttacgcttatgtcgcttatcagtggaaattaaacgctgatgtgattttatgcctttttttgtatatgccagtaacgatttatgggctgttcgcatggaaaaagacagagcagcatgaaggcgttatcaaggctcaaaaactttccaaaaattggcgttttatactcattttaggcgtaggggttttaacttgtgtgagcgctttgttttttaaagagattaaaacgaattttttatgggcagagagttttaatttcgtcatctttattattgcttttattttacaggttttgcgctatatagaaaattatgcgctagtaactttggggaatatcgtatccattatcgtgtggttttgtatttttcaaatttctacagagagcttggtgcaactcttcacaacgatcctatacctttttattggcttgtattattttaaccggtggaataagtcatgcaagcagtgattttagcgaatggggagtttcctaaatctcaaaaatgcttagaccttttaaaaaacgctccctttttaatcgcatgcgatggggctgttacctca

SEQ ID NO: 176 - protein, 220 aa, Helicobacter pylori
MLITTQLSKRFYATLALSCVFLTITNILVKGSFINLLAGLSGVLYAFFAGERQTICFVFGLVYNLSYAYVAYQWKLNADVILCLFLYMPVTIYGLFAWKKTEQHEGVIKAQKLSKNWRFILILGVGVLTCVSALFFKEIKTNFLWAESFNFVIFIIAFILQVLRYIENYALVTLGNIVSIIVWFCIFQISTESLVQLFTTILYLFIGLYYFNRWNKSCKQ

SEQ ID NO: 177 - DNA, 451 bp, Helicobacter pylori
  CDS (51)...(398)
agtttaaagaaaagattagaaaaattagaagataaaggaggtaacgactgatgagacacaaacacggataccgcaagcttgggagaaccagctcgcacagaaaggcgttattaaagaatttagcgatcgctttgattgagcataacaaaattgaaacagggatttataaggctaaggaattgcgcagttacattgagaaattgacgacagcggctcgtgtgggcgattttaatgcgcaccgccatgtttttgcatatttgcaaaacaaagaagccacccacaagcttgtaactgaaatcgcgcccaaatacgcgcaaaggaatggcggatacaccaggatccaacgcaccacttttagaagaggggacgcttccactctagccaccattgaatttgtatgaaatttgatgaactgctagccaagatttagtcttggttggtggttatcgct

SEQ ID NO: 178 - protein, 116 aa, Helicobacter pylori
MRHKHGYRKLGRTSSHRKALLKNLAIALIEHNKIETGIYKAKELRSYIEKLTTAARVGDFNAHRHVFAYLQNKEATHKLVTEIAPKYAQRNGGYTRIQRTTFRRGDASTLATIEFV

SEQ ID NO: 179 - DNA, 1204 bp, Helicobacter pylori
  CDS (36)...(1142)
aaaataagcgttttgatgccatttttggagcgatcgtggaattgagttattatgaaattttagaagtggaaaaacacagcaaccaagagaccattaaaaagtcttacagaaagctggctttaaaataccacccagacagaaacgccggcgataaagaagccgaagaaaaattcaagctcatcaatgaagcctatggggtgttaagcgatgaaaagaagcgggccttatacgacaggtatggtaaaaaaggcttaaaccaagccggcgcaagccaaggcgatttttctgatttttttgaagatttaggctcgttttttgaagacgcttttgggtttggcgctagggggagtaaaaggcaaaaaagctctatcgcaccggattatttgcaaacccttgaattgagtttcaaagaagcggtttttggctgtaaaaaaaccattaaagtccaataccagagcgtttgtgaaagttgcgatggcacgggcgctaaagacaaagccctagagacttgcaagcaatgcaatgggcaggggcaggtgtttatgcgtcaaggttttatgagttttgcgcaaacttgtggggcgtgtcaaggcaagggcaagatcgttaaaaccccatgccaagcgtgcaagggtaaaacctatatccttaaagatgaagaaattgatgcgataatccctgagggcattgatgatcaaaaccgcatggtgcttaaaaataaaggcaatgaatacgagaagggaaaaagaggggatttgtatttagaagcgcaagtcaaagaagatgagcatttcaagcgcgaaggctgcgatttattcattaaagcgccggtgtttttcaccactatcgctttagggcatacgattaaagtgccgtctttaaaaggggacgaactggaattaaaaatccctagaaacgccagagacaagcagacttttgcgtttagaaacgagggcgtgaaacaccctgaaagctcttatagagggagtttgatcgtggaattgcaagtgatttaccctaaaagtttgaataaagagcagcaagaattgttggaaaaattgcatgcgagttttggctatgagggcgagccgcataaaagcgttttagaaacctgtatttctaaaattaaagactggttcaaataaaaggttgttgatgcatgagtttctaaaagcttttaaagacgctttccctcataccattt

SEQ ID NO: 180 - protein, 369 aa, Helicobacter pylori
VELSYYEILEVEKHSNQETIKKSYRKLALKYHPDRNAGDKEAEEKFKLINEAYGVLSDEKKRALYDRYGKKGLNQAGASQGDFSDFFEDLGSFFEDAFGFGARGSKRQKSSIAPDYLQTLELSFKEAVFGCKKTIKVQYQSVCESCDGTGAKDKALETCKQCNGQGQVFMRQGFMSFAQTCGACQGKGKIVKTPCQACKGKTYILKDEEIDAIIPEGIDDQNRMVLKNKGNEYEKGKRGDLYLEAQVKEDEHFKREGCDLFIKAPVFFTTIALGHTIKVPSLKGDELELKIPRNARDKQTFAFRNEGVKHPESSYRGSLIVELQVIYPKSLNKEQQELLEKLHASFGYEGEPHKSVLETCISKIKDWFK

SEQ ID NO: 181 - DNA, 810 bp, Helicobacter pylori
  CDS (12)...(779)
cgcatggagaaatgagggtaatggccaaaattgaattgttagccaaattcacgcaaatcgcgctccctaacagccaccctttattgaaaaaagttttaaactacgccaaaaagcatttcagccagtgccacatgctctcttcatcgttactcatcttaaacgacacggaatgctttaaaaaaaactacttgcttaattgggtctatcatgcccttgaatgcgtgcatgaaaaagatattagcgcgcattctttagaagaggttttacaaaaaagccacctgcccatacgcatcaaaatcatggctcaaaacacgcttttagaaaagatagaagtgaaagttttaacctttggggcggaatatgcgctttttatcaccaaacaccctatcgccaagcggtttttacgccaaaaatttagcggctgtgtgtttttagaaacccaagatgaattgcatataagaggcgattcagagcgtttttgggaactcattgtaacgctcaatgaaaatagaatcgtccataacgcatgcttagatttcatctaccctaatggctttggcaaggacagctacaccactatggctgaacgcaaattaaaagaatgctataaaacgctagggtttatcaagcatgaagatttcagcgaagtcaaaaagcgctatttagaattggctaaaacctaccaccctgatttatgcgatctcaaagaaaaaaaggctctttatgccaaacgcttcgctatcattcaagaggcgtatcgccacattaaaaaacacgcctaaacccctaaactagccctaatcgcgctag

SEQ ID NO: 182 - protein, 256 aa, Helicobacter pylori
MRVMAKIELLAKFTQIALPNSHPLLKKVLNYAKKHFSQCHMLSSSLLILNDTECFKKNYLLNWVYHALECVHEKDISAHSLEEVLQKSHLPIRIKIMAQNTLLEKIEVKVLTFGAEYALFITKHPIAKRFLRQKFSGCVFLETQDELHIRGDSERFWELIVTLNENRIVHNACLDFIYPNGFGKDSYTTMAERKLKECYKTLGFIKHEDFSEVKKRYLELAKTYHPDLCDLKEKKALYAKRFAIIQEAYRHIKKHA

SEQ ID NO: 183 - DNA, 900 bp, Helicobacter pylori
  CDS (59)...(778)
catgatgattattataaaatcctaacgccgcatgaacaaataggatgggtcaaaaaagatgaagtcaaataaaaagtccaatcgtttaagagcgatttatagagctttagtgatcgctataggactagctgttatcatcgttttcaattactttaaccgcaaaaacaataacgcccgctccagccgtagggcttgttcgtgctttttttcccttaccggggttaatttagaaaaaataggcacttttgatacggacgctaaactcattgtcttaaaccaccaaagcttactagacatcatttatttagaagcctaccaccctagaaatatttgctggatcgctaaaaaagagctgggcgaaatccctttttatgggcatgccttaacggataccggaatgattttaattgacagagaggataaaaaggggattgtgagccttttgaaagcgtgtaaagaaaaattagaccaaaaccgccctttagtgattttccctgaaggcactagaggcaaaggaggagaaaaattcctccctttcaagcaaggggctaaaatcatcgccgaaaaattccagctcaaaatccaacccatggtgttaatcaattccattaaaatctttaattccaagcctctagaagcctataaagcgcgcacccgtttagtcatgctagaaagctatacgcctgattttaactcgcccacctggtatgaagaattacaagaacgcatgcaaaaagagtatttaaaacactatcatgaattaaaccctagcgaacaatgaagctttttgactacgctcctttgagtttggcttggcgggagtttttgcaaagcgaatttaaaaagccttattttttagaaatagaaaaacgctacctagaagccctaaaaatccctaaa

SEQ ID NO: 184 - protein, 240 aa, Helicobacter pylori
MKSNKKSNRLRAIYRALVIAIGLAVIIVFNYFNRKNNNARSSRRACSCFFSLTGVNLEKIGTFDTDAKLIVLNHQSLLDIIYLEAYHPRNICWIAKKELGEIPFYGHALTDTGMILIDREDKKGIVSLLKACKEKLDQNRPLVIFPEGTRGKGGEKFLPFKQGAKIIAEKFQLKIQPMVLINSIKIFNSKPLEAYKARTRLVMLESYTPDFNSPTWYEELQERMQKEYLKHYHELNPSEQ

SEQ ID NO: 185 - DNA, 990 bp, Helicobacter pylori
  CDS (40)...(858)
ggccaaactcgctttaactaaaatgatggagttatcttaatggagattagaacctttttagaacgcgctttaaaagaagatttagggcatggggatttgtttgaaagggtgttagaaaaagattttaaggccacagcgtttgttagggctaaacaagagggcgtgttttcaggcgaaaaatacgctttagagttgttggaaatgaccggcattgaatgcgttcaaacgattaaggataaagaacgcttcaagcctaaagacgctttaatggaaattaggggggattttagcatgcttttaaaggttgagcgcacccttttaaaccttttgcaacacagcagcgggattgctactttaacgagccgttttgtagaggctttaaattctcataaagtgcgtttgttggacacgagaaaaacgagaccccttttaaggatctttgaaaaatattccgtgcttaatgggggagcgagcaaccaccgcttagggctagatgacgctttaatgcttaaagacacgcatttaaggcatgtgaaagatctcaaaagctttttaacgcatgccagaaaaaacttgcctttcacggctaaaattgaaattgaatgcgaaagctttgaagaggccaaaaacgccatgaatgcgggagcggatattgtgatgtgcgataatttgagcgttttagagactaaagaaattgccgcttatagagatgcgcattatccctttgttttactggaagcgagcgggaacatttcactagagagcattaacgcttacgctaaaagcggcgtggatgccattagcgtaggggctttaatccatcaagccacttttattgacatgcacatgaaaatggcttaaagactttaaaaaggggttattaacatgctaaaagaatatttagaaagcattaaagatcttacgcctgaaaagaatgaactcacgcaccgcccttctttatacaacttgcttaatcagttaaaaaaccat

SEQ ID NO: 186 - protein, 273 aa, Helicobacter pylori
MEIRTFLERALKEDLGHGDLFERVLEKDFKATAFVRAKQEGVFSGEKYALELLEMTGIECVQTIKDKERFKPKDALMEIRGDFSMLLKVERTLLNLLQHSSGIATLTSRFVEALNSHKVRLLDTRKTRPLLRIFEKYSVLNGGASNHRLGLDDALMLKDTHLRHVKDLKSFLTHARKNLPFTAKIEIECESFEEAKNAMNAGADIVMCDNLSVLETKEIAAYRDAHYPFVLLEASGNISLESINAYAKSGVDAISVGALIHQATFIDMHMKMA

SEQ ID NO: 187 - DNA, 1153 bp, Helicobacter pylori
  CDS (51)...(1100)
gatcaaacgctacaaccctagctgtcttttagaagtggatgggggcgtgaatgataaaaatatctttgaactccaacaagcgggcgtggatgtggtggtttcagggagttatatttttaaatccaaagatcgtaagctggctattgaaggcttacagaatgtcagacaatctcttgcataaagacatccaagccctaatcgctcgcttaaagcgccaggacttaagcttgggcatgctagaaaaatcgctctctcgccttattcatgatgaaatcaatttggagtatttgaaggcgtgcgggctcaatttcatagaaacgagcgaaaatttaatcacgctcaaaaaccttaaaaccccccttaaagatgaggttttttcctttattgatttagaaaccaccggatcttgccccataaagcatgagattttagaaattggggccgtgcaagtgaaagggggggaaattatcaatcgttttgaaacccttgtgaaagtcaaaagcgtgcctgattatatcgctgagcttacaggcatcacttatgaagacaccctaaacgccccaagcgcgcatgaagctttgcaagaattgcggctttttttaggcaatagcgtgtttgtggcccacaacgctaattttgattacaactttttggggcgttattttgtagaaaaattgcattgccctttattgaatttaaagctttgcactctggatttatccaaacgagccattttgtccatgcgttattctttgagctttttaaaagagcttttagggtttggtatagaagtcagccatagagcctatgcggacgctttagcgagctataaactctttgaaatatgcctgttaaacttgcccagctacatcaaaacgacaatggatttgattgatttttctaaatgtgctaacacgctaatcaaaagacccccaaaagccagataccaagagattccatcgccattttctctttttgaaaagacaaagggcttgttcaatcataaaagcaaccagttaaacgaaagctgtttaatggggtttatggggactgaaattttagcatctctatttgatacttttgaatgttgcctagtattttgattttatcggttacttcgcactcatcgtatatctttttgtattcttgtatg

SEQ ID NO: 188 - protein, 350 aa, Helicobacter pylori
MIKISLNSNKRAWMWWFQGVIFLNPKIVSWLLKAYRMSDNLLHKDIQALIARLKRQDLSLGMLEKSLSRLIHDEINLEYLKACGLNFIETSENLITLKNLKTPLKDEVFSFIDLETTGSCPIKHEILEIGAVQVKGGEIINRFETLVKVKSVPDYIAELTGITYEDTLNAPSAHEALQELRLFLGNSVFVAHNANFDYNFLGRYFVEKLHCPLLNLKLCTLDLSKRAILSMRYSLSFLKELLGFGIEVSHRAYADALASYKLFEICLLNLPSYIKTTMDLIDFSKCANTLIKRPPKARYQEIPSPFSLFEKTKGLFNHKSNQLNESCLMGFMGTEILASLFDTFECCLVF

SEQ ID NO: 189 - DNA, 990 bp, Helicobacter pylori
  CDS (52)...(864)
aaaaacactttttaatgttataatctatcctaaacaatataaggggtttttatggcaaaaattgaaagcaatgattcccacctaagaggtattttaaaagacgaactctactatcaaatccccatctaccaacgcccttatcaatggacagaagaaaactgcgaaaaacttttagacgatttgttttttaattatgaagatgacagagaaggcgattatttttgcggctcattagtcttaattgcaatcagcaaagattctaaagccacaacctatgatgttgtagatggccagcaacgcttaagcactttcattctgcttgcaaaagttttagccgatctttataatgattgtttagaccctaagaatttagaacatttacaagagggttggaaagataggcatacagaaagaaaacgactgagttttaacactatagggtctaacgctgaatatgattttcaagatgcattagaacatttcaacgactctcaagcaagcaagaataaaaataataagaacaattacctaaaaaatgcgatctgtttaaaagactatctcatgaaaaaagagattaaaaacattaacgatttcattgagtggctgtattctaatgttaaatttatcaccatcatttgcccaaacatagacaaggcattaaggatttttaatgttttaaacgctaggggtttgcctttgaatgcgacagatatttttaagggggaattattaaaacacgctaaagagcatgagcgagaagaatttgtgtctcgttggaacgccttaagccaaaaatgctcggacaatgatttaacaatggagacattattcagttggtataacctatctcaatccggtaacttctagagacaaaatggaaaaagagctcgttacttggttcaacatacttaacaaaccccccctagaataccttaagggcgtagaggatttttacaacgcttatggtgaggtgttagaaatgcaagatcg

SEQ ID NO: 190 - protein, 271 aa, Helicobacter pylori
MAKIESNDSHLRGILKDELYYQIPIYQRPYQWTEENCEKLLDDLFFNYEDDREGDYFCGSLVLIAISKDSKATTYDVVDGQQRLSTFILLAKVLADLYNDCLDPKNLEHLQEGWKDRHTERKRLSFNTIGSNAEYDFQDALEHFNDSQASKNKNNKNNYLKNAICLKDYLMKKEIKNINDFIEWLYSNVKFITIICPNIDKALRIFNVLNARGLPLNATDIFKGELLKHAKEHEREEFVSRWNALSQKCSDNDLTMETLFSWYNLSQSGNF

SEQ ID NO: 191 - DNA, 283 bp, Helicobacter pylori
  CDS (51)...(230)
ccctagaatgcgtgcttttggctaaggaatttttgcctaacgctaggcttatggtggctggggggcgtgaagtggtgtttaaagataatgacaaaaaggaagccaagctttttgaatacggcatcaatgcggtggtgctaggggactatttgaccaccaaaggcaaagcccctaaaaaagatatagaaaaactgctctcttatggcttgacaatggcgacaagctgtcattaatgagagaactttttaaaagcgttagagggttttttcgccttcttagaatg

SEQ ID NO: 192 - protein, 60 aa, Helicobacter pylori
MVAGGREVVFKDNDKKEAKLFEYGINAVVLGDYLTTKGKAPKKDIEKLLSYGLTMATSCH

SEQ ID NO: 193 - DNA, 478 bp, Helicobacter pylori
  CDS (51)...(425)
cacttgtttggagtgcctataggcataataagtcctgtttctatttttaatggtggtatgataacaatgtcaacttacagcttttttatggatttttacacaatgtgtatgaaaatgagaagtttttcatcggttattttataggggctgggctagggggtgagagcgtaacacccaatgttcttaaagattttggtaatatgttagcgcaattagtgcaatttcagggctatggctcactagggctaaggatgggcgataaacaccacacgctagaattgagcacgagcgttcatggcgacgctcctagttgttctttaaaaaagctaaagagttgcgaaagtgcgagggttttacaagcaaaaatccctaggggcatttttgaaagctatgttacttggagcgcggattatgtttatcgtttttaaaagtttttaaaaatttaatggctttgttccaattgaataggggtaataaa

SEQ ID NO: 194 - protein, 125 aa, Helicobacter pylori
WWYDNNVNLQLFYGFLHNVYENEKFFIGYFIGAGLGGESVTPNVLKDFGNMLAQLVQFQGYGSLGLRMGDKHHTLELSTSVHGDAPSCSLKKLKSCESARVLQAKIPRGIFESYVTWSADYVYRF

SEQ ID NO: 195 - DNA, 2169 bp, Helicobacter pylori
  CDS (53)...(2119)
cttttaaaaggctaatgcctttttaaaaaattgaaataaaggaataaaagttatgacggataacaaccaaaacaatgaaaaccatgaaaacagcagtgaaaattcaaaagctgatgagatgcgagccggagcgtttgagcgcttcaccaaccgcaaaaagcgtttcagagaaaacgcgcaaaaaaacgcagagtattcaaaccatgaagcgtcttcgcaccataaaaaagagcatcgccctaacaaaaaaccaaacaaccaccacaaacaaaaacatgccaaaacacgaaattacgcccaagaagaattggatagcaacaaagtagagggcgttacggaaattttgcatgtgaatgagagagggactttaggctttcataaggagttaaaaaagggcgttgaagcgaataacaagatccaagtggagcatttaaacccgcattataagatgaacttaaactctaaagcgagcgttaaaatcacgcctttagggggcttgggtgagattggggggaacatgatggtcattgaaaccccaaaaagcgcgatcgtgattgatgcgggcatgagcttccctaaagaggggctctttggcgtggatattttaatcccggatttttcctacttgcaccaaatcaaggacaaaatcgctggcattatcatcacccatgcccatgaagatcacataggggccacgccttatttgtttaaagagctgcaattccccctttatggcacgcccttgagtttggggctgattgggagcaagtttgatgaacatggtttgaaaaaataccgctcgtattttaaaatcgtagaaaagcgctgtcccattagcgtgggcgaatttatcattgaatggatccacatcacgcattctatcattgacagcagcgctttagcgatccaaactaaagccggaacgatcatccacaccggcgattttaaaatcgatcacaccccggtggataatttgcccacggatttgtatcgtttagcgcactatggcgaaaagggggtgatgcttcttttaagcgattccaccaactcccataaatccgggactacgccgagtgaaagcaccatagcgccggcttttgataccctttttaaagaagcgcaagggagggtgattatgagcaccttctctagcaatatccaccgggtctatcaagccatacaatacggcattaaatacaaccgcaagatcgctgtgatcgggcgctctatggaaaaaaacctagacatcgctagagaattgggctatatccatttgccttatcaatcttttattgaagccaatgaagtcgccaaatacccggacaatgaaatcttaatcgtaacgaccggctcacaaggcgaaaccatgagcgcgctttatcgcatggcgactgatgaacaccgtcatatttctatcaaacccaacgatttagtcatcatttccgctaaagccattcctggcaatgaagcgagcgtttcagcggtgttgaatttcttgatcaaaaaagaagctaaagtggcttatcaagaatttgacaatatccatgtgagcgggcatgccgcccaagaagagcaaaagctcatgttaagactcattaagcctaagtttttcttacccgtgcatggggaatataaccatgtcgcgcgccacaaacaaaccgctatttcttgcggagtgcctgaaaaaaatatctatttaatggaggatggcgatcaggtggaggttggccctgcgttcatcaaaaaagtcggcacgattaaaagcgggaaaagctatgtggataaccaaagcaatttgagtattgatacaagcatcgtgcaacaaagagaagaagtcgctagcgccggggtgtttgtggctacgatttttgtgaataaaaacaagcaagcgcttttagaaagctctcaattttccagtttagggcttgtgggtttcaaagatgaaaagcctttgatcaaagaaattcaagggggcttagaggtgttattgaaatccagcaacgccgaaattttgaataaccctaaaaaattagaagatcacactcgtaatttcatcagaaaagcgctctttaaaaagtttagaaaatacccggctatcatttgtcatgcccattctttttgattgtaacgctattgcttcacaagttttaaaagatgaagcgagcgcgc

SEQ ID NO: 196 - protein, 689 aa, Helicobacter pylori
MTDNNQNNENHENSSENSKADEMRAGAFERFTNRKKRFRENAQKNAEYSNHEASSHHKKEHRPNKKPNNHHKQKHAKTRNYAQEELDSNKVEGVTEILHVNERGTLGFHKELKKGVEANNKIQVEHLNPHYKMNLNSKASVKITPLGGLGEIGGNMMVIETPKSAIVIDAGMSFPKEGLFGVDILIPDFSYLHQIKDKIAGIIITHAHEDHIGATPYLFKELQFPLYGTPLSLGLIGSKFDEHGLKKYRSYFKIVEKRCPISVGEFIIEWIHITHSIIDSSALAIQTKAGTIIHTGDFKIDHTPVDNLPTDLYRLAHYGEKGVMLLLSDSTNSHKSGTTPSESTIAPAFDTLFKEAQGRVIMSTFSSNIHRVYQAIQYGIKYNRKIAVIGRSMEKNLDIARELGYIHLPYQSFIEANEVAKYPDNEILIVTTGSQGETMSALYRMATDEHRHISIKPNDLVIISAKAIPGNEASVSAVLNFLIKKEAKVAYQEFDNIHVSGHAAQEEQKLMLRLIKPKFFLPVHGEYNHVARHKQTAISCGVPEKNIYLMEDGDQVEVGPAFIKKVGTIKSGKSYVDNQSNLSIDTSIVQQREEVASAGVFVATIFVNKNKQALLESSQFSSLGLVGFKDEKPLIKEIQGGLEVLLKSSNAEILNNPKKLEDHTRNFIRKALFKKFRKYPAIICHAHSF

SEQ ID NO: 197 - DNA, 2770 bp, Helicobacter pylori
  CDS (46)...(2721)
gaagacagagtctttgtacatgaaaataaaacggtggtgttttgaatgcttttagatttcagcaacctcaatgaagaacccttaaaaaaccaaatcaaagccgagttttttaaggataagaaattcctttatagcggggataaaatagatttcatgctaagctataagcattctaacgccaccttacccattttatggggcgaagctaaaaggggcgattttgatgatttggacaaagctttcacgcaacttcttttaaccataggcaagcacaggctttatacccaccacacaccaccttatttgtgcgcttttaacgcttttaaaatggaatttatcgcctttgatgacacgatcacaagctttttttataaaagcgatatagatttttctatcaccccaagcaaccacaacacagaaggttttaaacatgctttagacgcgtttaaagccatgagcaaatcccataaattcgtttttgactttaaaacccaaagccaagaatgcaaagaatttatcaaaaaccgtttaaattctagccatttactcagcaaaatccaaattgacaaaaacaatttctttacgatctatcaaaagtggcttgaaattgtcaaacccaccattgacataaattgggaggtggctaaaactaaagacattttagacgcagactattatttagcggatttgcttagcgatggcgataaaaccattattgagaaattgcacacgattttaagatcgagccattataaattgaataggggtgtgaatgaattaggcaaaatggattttatggaagttggtttcacagacagccaacaagcccatcaagaattttggagcgtttatgaacgaccgcctaaaagagaatttcaagcctctattttagagcggcgcgacttgttagtaccaagcgatgtgagagaaaggaaaggggcgtttttcacccctaaaatctgggtagaaaagagtcaagaatatttagctaaagctttggggcaagattatcaagaggattgtatcatttgggattgcgctggggggactgggaatttgcttcgaggtttattgaataaggctaatttgtatctatccactttagatcataacgatgtggcaatcgttaaagatctggctgcaaaaaaccacttaaaattactggaaaatcatgttttccaatttgactttttaaacgatgattttttcagcgataaaacgccaaaaagcttgcaagaaatcttaaaagacaaagagaaacgaaaaaagctcatcatttacatcaacccgccctatgcagaagcaggtaataaatctaagatgagtggcacaggcgaacataaagccaaagtggcacgagacaatctcatctgtgaaaaatacaaaaatgaattaggcaaggctaataatgaagtttttgcacaatttttcatgcgtatttacaaagaattaaacggtgttatccttgcaagtttttcaactttgaaaaacttgcaaggatctaattttaaaaaattcagagaaatctttaaagctaaatttttagaggggtttatggtgccagcagacacttttgataatgttagggggcaatttcctatcggctttttagtgtgggatacaagctctattcttcctaaagaaaaccccctaaatttagggggcaactctaaagaagagaaacaaaactccaatttaatcttagaccaagacaatttgaaagataatcccttgaaagagcgtttttgccttttagacataaacgctcctaataggaagatgtgttcccaaagcagaacaagaactaaggggacacaaaagcattctacagcagccccctttgaaacccctttacacactgttagtttagaaatatttgatagtttcggcggatttttaggcagtaaaaaaatatacactcacacaatagacaaaatgcttactttagcggattatttacaaaagtttcagccaacaaaaagagacactatttttggctatttagatcctggtcgcaatagttttcaacatcaaaatctaattcatattagcattattgacaaatcaaaacaatcgcatgtaaaatattttccaatcattgcaactacaattttgttggtatctgtatttttctccatccgccattgcatcaaagccacatggcaaaacgatagggatcaattttacgccccctatgacgatgcgttccaagacgacagcgagtttaaaaacaattgtttgattttcatgctttttcacacccagaaccgcatcactaccgctcaagggactaaccattttatcccctttagcgaaactgaagtcaatgccaaagaaagatattctagccacgctctattagagtttttaaaaggcgaaatcaaagaacttaaagagaacgatagcctctttttaagtgccaaaaaagaaaacaagcccctgaaattcagcccgagcgcttcaaaggtgtttgacgctagcagagaggtttatcgctattaccacacacaagatttcacaaaccgcccctataacgctaacgcaagcctttatgacatcaaagaattttttcaaggccgtaacaagcaaggcaaattaaatttacccgctaaagctaaagatgaatattacaaacagctttacgctaatttgcaagacgccctaaaagatctcgccaaagaaatacagcctaaagtctatgaatacgggtttttaagggagtgatttttaagacaaataatcaaaaagctagagcaagcggtatttttta

SEQ ID NO: 198 - protein, 892 aa, Helicobacter pylori
MLLDFSNLNEEPLKNQIKAEFFKDKKFLYSGDKIDFMLSYKHSNATLPILWGEAKRGDFDDLDKAFTQLLLTIGKHRLYTHHTPPYLCAFNAFKMEFIAFDDTITSFFYKSDIDFSITPSNHNTEGFKHALDAFKAMSKSHKFVFDFKTQSQECKEFIKNRLNSSHLLSKIQIDKNNFFTIYQKWLEIVKPTIDINWEVAKTKDILDADYYLADLLSDGDKTIIEKLHTILRSSHYKLNRGVNELGKMDFMEVGFTDSQQAHQEFWSVYERPPKREFQASILERRDLLVPSDVRERKGAFFTPKIWVEKSQEYLAKALGQDYQEDCIIWDCAGGTGNLLRGLLNKANLYLSTLDHNDVAIVKDLAAKNHLKLLENHVFQFDFLNDDFFSDKTPKSLQEILKDKEKRKKLIIYINPPYAEAGNKSKMSGTGEHKAKVARDNLICEKYKNELGKANNEVFAQFFMRIYKELNGVILASFSTLKNLQGSNFKKFREIFKAKFLEGFMVPADTFDNVRGQFPIGFLVWDTSSILPKENPLNLGGNSKEEKQNSNLILDQDNLKDNPLKERFCLLDINAPNRKMCSQSRTRTKGTQKHSTAAPFETPLHTVSLEIFDSFGGFLGSKKIYTHTIDKMLTLADYLQKFQPTKRDTIFGYLDPGRNSFQHQNLIHISIIDKSKQSHVKYFPIIATTILLVSVFFSIRHCIKATWQNDRDQFYAPYDDAFQDDSEFKNNCLIFMLFHTQNRITTAQGTNHFIPFSETEVNAKERYSSHALLEFLKGEIKELKENDSLFLSAKKENKPLKFSPSASKVFDASREVYRYYHTQDFTNRPYNANASLYDIKEFFQGRNKQGKLNLPAKAKDEYYKQLYANLQDALKDLAKEIQPKVYEYGFLRE

SEQ ID NO: 199 - DNA, 996 bp, Helicobacter pylori
  CDS (70)...(948)
aaaagccacgcaatcagccacaaacatcatcacacaagcctttggctatcaattattaatgagataaagatgttagaatttattttaaaaattcaagctagagactctaaaggcttggtgagcacgattagcaccactatcgctaacaagggctataacatcgtcaaaaacgatgaatttgttgatcccttaaaacagcgttttttcatgcggttaaaaatccaaaaagaaatcaagcccttgaatactgaaattaaagagcaagaagagcaatccttaaagaccgctctttttaaagccctagaaaactttaacgagttattgattgaagtcattttaacgcataaaaaaaacatcattctgctcgctactaaagagagccattgcttaggggatttgcttttaagggtgtatgggggggaattgaacgctcaaattttaggcgttatttccaaccacgagattttacgccctttagtggaaaaatttgacatcccttatttttatgcgccttgcgacaatcaagttttgcatgaaaaagaagttttagaaatcattaaaaacctggaattaaagcacaaagtgagtgcagacttgctcgttttagccaaatacatgcgcattttaagccatgattttacgaagcgctatgaaaaccagatcttaaatatccatcatagtttcttgcccgcattcattggggctaatccttaccagcaagcgtttgaaaggggcgtgaaagtcatcggggccacggcgcattttgtgaatgaaagccttgatgctgggccgattatcatacaagacactctgcccattaaccacaattacagcgtggaaaaaatgcgcctagcgggtaaggatatagaaaaactggttttagctagggctttaaaactcgttttagaagacagagtctttgtacatgaaaataaaacggtggtgttttgaatgcttttagatttcagcaacctcaatgaagaacccttaaaaaac

SEQ ID NO: 200 - protein, 293 aa, Helicobacter pylori
MLEFILKIQARDSKGLVSTISTTIANKGYNIVKNDEFVDPLKQRFFMRLKIQKEIKPLNTEIKEQEEQSLKTALFKALENFNELLIEVILTHKKNIILLATKESHCLGDLLLRVYGGELNAQILGVISNHEILRPLVEKFDIPYFYAPCDNQVLHEKEVLEIIKNLELKHKVSADLLVLAKYMRILSHDFTKRYENQILNIHHSFLPAFIGANPYQQAFERGVKVIGATAHFVNESLDAGPIIIQDTLPINHNYSVEKMRLAGKDIEKLVLARALKLVLEDRVFVHENKTVVF

SEQ ID NO: 201 - DNA, 882 bp, Helicobacter pylori
  CDS (48)...(824)
cgatagtgttgtaggatacttttgaaatttaagcggtaagttggataatggcgttttggcataaaagattagcggttggttgttgtatcgttttattttcatgcatgatgaacgctaatagcattcaaatcgttagagacgatccgccccttgatccaacgctccctgcatgggtttattctgttgcgttattaaaagtgtattttagcgatgggacttataaagaaggctatgcgactttgctcaaaaacgggcgttatatcgcttcttctgaaacgctttattctaacggcttataccctaaaacgattttagccaaaatgcaagacagcagcgctaaagagctgatttgtatagctagcctacgccttgaagcgatggataggaatcaagggctttcgcttttaaaaaccgccgattttagagacgattattgccataaaagagaagagagctattatcatgcaaggatttacacaaaatacgctcaaacttttcattcaaatccctataccaatcaaaaaacacccaattctgatctctactacccagcgttaaatgaggggaattctttttctatacagataatgggcatttctgtggctgaacttttgaaatctaaaaaattcctttcgcttgatgtttcttttaaaaaggggagcgtgttgtggggagggaggccttattttagcgaagtgggggagtttatggggatggctagcagcactttagaaaaccaagaaagtctggtgattatccctaaagaaaagatcgtgcaatttttaaacgctctaaaaaatcaaaatattttcccaaacattccctaagtttaagcaaaccttaagctttctatgactatactttcatttccttgtttcagca

SEQ ID NO: 202 - protein, 259 aa, Helicobacter pylori
MAFWHKRLAVGCCIVLFSCMMNANSIQIVRDDPPLDPTLPAWVYSVALLKVYFSDGTYKEGYATLLKNGRYIASSETLYSNGLYPKTILAKMQDSSAKELICIASLRLEAMDRNQGLSLLKTADFRDDYCHKREESYYHARIYTKYAQTFHSNPYTNQKTPNSDLYYPALNEGNSFSIQIMGISVAELLKSKKFLSLDVSFKKGSVLWGGRPYFSEVGEFMGMASSTLENQESLVIIPKEKIVQFLNALKNQNIFPNIP

SEQ ID NO: 203 - DNA, 669 bp, Helicobacter pylori
  CDS (88)...(603)
aaaataaggaggaattgtttgattttacgattggctggagcaagcgttttaacggcttgtgtcttttcggggtgtttttttttaaaaatgtttgataaaaaactttctagtaacgattggcatatccaaaaagtggaaatgaaccatcaagtctatgacattgaaaccatgctcgctgatagcgcttttagagagcatgaagaagagcaagattcctctctaaataccgctttgcctgaagataaaacagcgattgaagccaaagagcaagagcaaaaagaaaaaagaaaacgctggtatgagctttttaaaaagaaaccaaagcccaaaagctctatgggagagtttgtgtttgatcaaaaagaaaatcgtatttatggcaaaggctattgcaaccggtattttgccagctatgtatggcagggcgataggcacattgggattgaagatagcgggatttcaagaaaagtgtgtaaagatgagcatttaatggcgtttgaattggaatttatggagaattttaagggtaattttacggtaactaagggcaaggacacgctcattttagacaaccaaaaaatgaaaatttatttgaaaacgccttgagtgggtttttgatttcaaaacaatctaagatcactaaattagggattaaaaagaaatttttaa

SEQ ID NO: 204 - protein, 172 aa, Helicobacter pylori
MFDKKLSSNDWHIQKVEMNHQVYDIETMLADSAFREHEEEQDSSLNTALPEDKTAIEAKEQEQKEKRKRWYELFKKKPKPKSSMGEFVFDQKENRIYGKGYCNRYFASYVWQGDRHIGIEDSGISRKVCKDEHLMAFELEFMENFKGNFTVTKGKDTLILDNQKMKIYLKTP

SEQ ID NO: 205 - DNA, 290 bp, Helicobacter pylori
  CDS (53)...(235)
ttgagcttaagaaacattgataattttgtggaaaaaggctctgctttgatagataaatttgacgctaacccctataaaacgatttttggagaaaggaaataatcatgagagctacggcgataaaaatcttttcactctcatcagcattagccctattgcttcatggttgcttgagcatcaatttaaaacaaatgctaccagagatcagaacttacgatttgaatgcgagttcttttgaaatcacgcaatgcgctaaacctttgactgaagtgaggctcattagtattttg

SEQ ID NO: 206 - protein, 61 aa, Helicobacter pylori
INLTLTPIKRFLEKGNNHESYGDKNLFTLISISPIASWLLEHQFKTNATRDQNLRFECEFF

SEQ ID NO: 207 - DNA, 810 bp, Helicobacter pylori
  CDS (28)...(771)
tatcaaaaaataaagggaaaagactgaatgttgaaaagaatgatattattaggggctttgggtgttttagcgagcgctgaagagagtgcggcttttgtgggagtcaattaccaggtgagcatgatacaaaatcagactaaaatggtgaatgacaacggcttgcaaaagcctttgataaagtttccgccttacgcaggagcgggttttgaagtgggctataagcaattttttggtaagaaaaaatggtttggcatgcgttattatgggttttttgactacgcgcacaaccgctttggcgtgatgaaaaagggcattccggtgggcgatagtgggtttatttacaatagttttagttttggagggaacactttaacggaaagggattcctatcaggggcaatactatgtcaatttattcacttatggcgtggggttagatacgctgtggaattttgtgaataaagaaaacatggtttttggttttgtggtggggatccaattagcgggggatagttgggcaacgagcatcagtaaagaaatcgctcattatgcaaaacaccacagcaattccagttatagcccggccaatttccagtttttatggaagtttggggtccgcacccatatcgctaaacacaatagcctagaattagggattaaagtgcctacgatcacacaccagcttttctctcttaccaacgaaaagggatacaccttacaggctgatgtgcgtagagtttatgcgtttcaaatcagttacttgagggatttttaacccctttttagatacaatcacgcctgaaactatcca

SEQ ID NO: 208 - protein, 248 aa, Helicobacter pylori
MLKRMILLGALGVLASAEESAAFVGVNYQVSMIQNQTKMVNDNGLQKPLIKFPPYAGAGFEVGYKQFFGKKKWFGMRYYGFFDYAHNRFGVMKKGIPVGDSGFIYNSFSFGGNTLTERDSYQGQYYVNLFTYGVGLDTLWNFVNKENMVFGFVVGIQLAGDSWATSISKEIAHYAKHHSNSSYSPANFQFLWKFGVRTHIAKHNSLELGIKVPTITHQLFSLTNEKGYTLQADVRRVYAFQISYLRDF

SEQ ID NO: 209 - DNA, 1354 bp, Helicobacter pylori
  CDS (190)...(1299)
agtaagcttgattttaaaaaaccaaatgcccccaaagcgataggcccccttaatagccaactcaacgctattaagtggggcgagttcagattgggggatttgtttgaagtgttgtcaagtaagaaaatttatcatgccaacacgataaaaatccatgacacgcaaatagaaaacagctacccttatgtcgtgcgcgctgcaaccaataatggtataaaaggctttattatagatgaccctacatttgctaataaaaaaaataccctttcgttcgcgcaagacactttcactgtgttttatcaaaaacaaccttattttacaggcaataaggttaaaattttaaaaccaaaatttgctttcaaaagccctaaaattttacattctataagcgcgattttacaatttattttaaaacccttaacttgggggctaggctctacaacagaaagcattgcggagtttaaattttctctacccctaaaacccaccgctaacgctcaaacccttgaggatattgattttgatttcatggaaaaattcatagccgaacttgagcagtgtcggctcgccgaacttgagcagtgtcggctcgccgaacttcaggcttatttaaaagctacagggctagaaaacaccaccctttctaacgatgaagaaaacgcccttaatgttttcaataattctggggggggggggggtaataccccatgcggcttaacatggcaaagctttagattaggggatttgtttgaaattgaaaaaaccttaagctttaataaagacgctttaacgcaaggagaagattatgattatattacaaggacttcgcaaaatcaaggcgttttgcaaactacaggatttgtcaatgcagaaaatttaaacccaccatttacttggagtttagggcttttgcaaatggattttttctatcgtaaaaagtcatggtatgcgggacaattcatgcgaaaaatcacaccaaaaactgaaattgaaaataaaattgatttacgcatagccaactacttcacaacgcttttaaacgccttaaaacgccctttattaagcgtattggttagagatattgataaaacttttagggagcaaaaaatccaactacccctaaaacccaccgctaaaactcaaacccttgatggtattgattttgatttcatgcacacccttatcaacgccctaatgaagcaaaccattcaaggcgtggctcaatactgcgacgctaaaatacaagctacaaaagaggttatcagccaagaagcgcccgttcaaaaagactcgttattttaaaaggggttttaagcgcgctagcttgtgttacaataaacttaaaattcgcttg

SEQ ID NO: 210 - protein, 370 aa, Helicobacter pylori
VRAATNNGIKGFIIDDPTFANKKNTLSFAQDTFTVFYQKQPYFTGNKVKILKPKFAFKSPKILHSISAILQFILKPLTWGLGSTTESIAEFKFSLPLKPTANAQTLEDIDFDFMEKFIAELEQCRLAELEQCRLAELQAYLKATGLENTTLSNDEENALNVFNNSGGGGGNTPCGLTWQSFRLGDLFEIEKTLSFNKDALTQGEDYDYITRTSQNQGVLQTTGFVNAENLNPPFTWSLGLLQMDFFYRKKSWYAGQFMRKITPKTEIENKIDLRIANYFTTLLNALKRPLLSVLVRDIDKTFREQKIQLPLKPTAKTQTLDGIDFDFMHTLINALMKQTIQGVAQYCDAKIQATKEVISQEAPVQKDSLF

SEQ ID NO: 211 - DNA, 450 bp, Helicobacter pylori
  CDS (164)...(367)
aatccagcatgccctctaattcaaacacgccctcttcaagcttgtttatgccctcttgttttaagtcgtattcgtcgctaatctcgcccatgatctcttcaatgatgtcttccatagtgagcaacccggctgtgccgccgtattcatcaatcaccaaagcggtatggatttgctcttttttcattttaataaggatttgagaaatggaagcgctttcggggacgatgatcattttcctaacgatttgattgaaatcatgcattttgggggtaaaaatagagcgcgaaagcaaatccctaatatgcaccatgccgataatgttatccttagaacccttgcaataagggtagcgcgtgaaatggccttttaaaacaatgtctatattttcttcatagctgttttcttcatccaaacacaccatgtcttttcgtggggtcatgatttctttag

SEQ ID NO: 212 - protein, 68 aa, Helicobacter pylori
MDLLFFHFNKDLRNGSAFGDDDHFPNDLIEIMHFGGKNRARKQIPNMHHADNVILRTLAIRVAREMAF

SEQ ID NO: 213 - DNA, 1051 bp, Helicobacter pylori
  CDS (51)...(998)
accaagaggtcgttaaaagctattaccaacatttaaaacaaggataaaacatgcaagaattcagtttgtggtgcgattttatagaaagggattttttagaaaacgactttttaaagctcattaataagggggctatttgcggggcaacgagtaaccctagtttgttttgcgaagcgatcacaaaaagcgcgttttataaagatgaaatcgctaaactcaaaggcaaaaaagctaaagaaatttatgaaactctggcgttaaaggatattttacaagcttctagcgcgttgatgcctttatatgaaaaagaccctaacaatggctacattagcctagaaattgacccttttttagaagatgatgccgctaaaagcattgatgaagccaagcggttgttcaaaacattaaaccgccctaatgtgatgattaaagtcccagcgagtgaaagcgggattgaagtggttagcgctttaactcaagcctctattcctgttaatgtaactttagtcttttcgcctaaaattgccggtgaaatcgctcaaatcttagccaaagaagcgcaaaaaagagcggtcattagcgtgtttgtctcacgatttgacaaagaaatagaccctttagtgccaaaaaatttgcaagctcaaagcgggattatcaacgctaccgagtgctattatcaaattaatcagcatgccaataagctaacaagcaccctttttgcatccacaggcgttaaatccaattctttagctaaagattactacattaaagcgctgtgttttaaaaactctatcaatacagcccctctagaggctttaaacgcttatttgcttgacccaaacaccgagtgtcaaacccctttaaagactacagaaattgaagcgtttaaaaaagaattaaaagtgcacaacattgatttagaaaacaccgctcaaaaactccttaaagaaggcttgatagcgttcaaacaatcctttgaaaagcttttaagcagtttttgatttttaagggttttttggatagaataagcccttattttattttaaaggat

SEQ ID NO: 214 - protein, 316 aa, Helicobacter pylori
MQEFSLWCDFIERDFLENDFLKLINKGAICGATSNPSLFCEAITKSAFYKDEIAKLKGKKAKEIYETLALKDILQASSALMPLYEKDPNNGYISLEIDPFLEDDAAKSIDEAKRLFKTLNRPNVMIKVPASESGIEVVSALTQASIPVNVTLVFSPKIAGEIAQILAKEAQKRAVISVFVSRFDKEIDPLVPKNLQAQSGIINATECYYQINQHANKLTSTLFASTGVKSNSLAKDYYIKALCFKNSINTAPLEALNAYLLDPNTECQTPLKTTEIEAFKKELKVHNIDLENTAQKLLKEGLIAFKQSFEKLLSSF

SEQ ID NO: 215 - DNA, 1254 bp, Helicobacter pylori
  CDS (55)...(1215)
agctataataaaataattaaaaaagtaacacttaagcggagaccctagagagtgatgctcaattttatgacaaagaagaaaaatagaatgcaagattgcaaaatggtttgtaaaaattttaatcgtaaggaatctgttttgatagctcaatctttagatatttctaaaaaaggttcggtaattttaggcgctcttttgagttcgttatggctgacaaaccccttaaatgcccatgaaaagaatggcgcgtttgtggggattagcttggaagtgggtagggccgatcaaaagacaaacgcttataaaaacggcgagttgtttcaagtgccttttggcgatgtttcggctaatgatgatggcaaagttcctgacgggcagaccggtggctgtcagccagcttcagggacgccaggaacgccaggctacactaaagctaactgcgtggtcaattggacttcgcgcaccatgcttagcaccaataaaaacattcctggccgtaaccagccgatgtatgggctaggcgtgatgacaggctataagcattttatcggtaaaaaaagatggtttgggttgcgctattacggcttttttgattatgggcataccaatttctctaactccagagccgctaacgctatatcgcctttttatttgagcgatcaaaaagccgacatgtatacttatggttttggcacagacatgctttttaacattatagataagcctaaagccacggccgggttttttttaggcgtgaattttgcgggtaacacttggactaataatcgtgtggggtattttaaggacgggtatgtttatggcgtcaatacggacgctgacgcttacatgactaacgctgatggcacaatcacttgcggggacacgacgccggcgagttgcaatgtggggattaaccctaatagcgtctataccacaggaaaattgaacgctaaggtgaatcacacgattttccaatttttagtgaatgtgggcattagaactaatatttttgaacaccatggcattgagtttggcatcaaaatccccacgctccctaactactttttcaaaggttctactaccataagagcgaaaaaacaaggcccgctagagaatggccaaccaaccactatcaccggagcagaaaccaatttcagcttaacccaaaccttacgccgtcagtattctatgtatttgcgctatgtttatactttttaagtttggtagggtttttaggcaaggcttagagatgaa

SEQ ID NO: 216 - protein, 387 aa, Helicobacter pylori
MLNFMTKKKNRMQDCKMVCKNFNRKESVLIAQSLDISKKGSVILGALLSSLWLTNPLNAHEKNGAFVGISLEVGRADQKTNAYKNGELFQVPFGDVSANDDGKVPDGQTGGCQPASGTPGTPGYTKANCVVNWTSRTMLSTNKNIPGRNQPMYGLGVMTGYKHFIGKKRWFGLRYYGFFDYGHTNFSNSRAANAISPFYLSDQKADMYTYGFGTDMLFNIIDKPKATAGFFLGVNFAGNTWTNNRVGYFKDGYVYGVNTDADAYMTNADGTITCGDTTPASCNVGINPNSVYTTGKLNAKVNHTIFQFLVNVGIRTNIFEHHGIEFGIKIPTLPNYFFKGSTTIRAKKQGPLENGQPTTITGAETNFSLTQTLRRQYSMYLRYVYTF

SEQ ID NO: 217 - DNA, 534 bp, Helicobacter pylori
  CDS (47)...(481)
agtagattaaaaactctttaattttcccatgaataaaggattttaaatggatgcgatttatccttatgtgttggttgttcatttattgtgcgccattatttttattggctacttgttttttgatggggtaattttccctaatgtgaagaaaatgtttggcgaagagtttgccaataaagcgaatacaggaatcactcaaagagcgatcaaaatcatgcccttatgcgttttagggcttgttttaacagggggcatgatgcttagccaatacatggggggcgataaaggctggtgtgaaaccccttttcaaaagatactcatgcttaaagtgatcttagcgttaagcatttttcttttggtgcttttttctttatcgtgtaagtttttgggcaagaaaaaccctattggtaaatatatccaccctatcgctctaacttttggctttttaatcgccattttagccaaaacgatgtggtttgtttaagagcgtttcaacctcaaagaatttaagaccactaagagtgagctagcgct

SEQ ID NO: 218 - protein, 145 aa, Helicobacter pylori
MDAIYPYVLVVHLLCAIIFIGYLFFDGVIFPNVKKMFGEEFANKANTGITQRAIKIMPLCVLGLVLTGGMMLSQYMGGDKGWCETPFQKILMLKVILALSIFLLVLFSLSCKFLGKKNPIGKYIHPIALTFGFLIAILAKTMWFV

SEQ ID NO: 219 - DNA, 635 bp, Helicobacter pylori
  CDS (48)...(584)
accacctcaccgatgaagaaattaagatcattgaagaggggcagtgaatggaaaagttatttgaaaagatattgcatgaaatgagatcaagaacttcttttctgcttgcttttgtcgtttcgcttattgtttttatttttaatctaaaaggggtttttcaattgatttttgagtctattttccaatacacccaaaacaaaatcctttctttttctctttcttttttctttattttctttttcttttacgctatttttcttattttttatcaaatatttctttggtatggggctaaaaaatataaacaaaatcaaagagatagtgaaattgtctataacattcaaaaattcccaaatgagataaaagaagaactttatcgttgctattctaaaaaacaaaataaaattcttagaacgaaaaaacttgatgatttgatagattatcttgatttaataggtttttttaagtcgagagatttttttgaaccgacaaaagacgattatattgtcaaaccggatgtcttaagggctataaaaaaataccataaaattgcttttaaatctgtatattggcaacagaacaaataaaaagcgcttgttctttgtctaagaaacacccccctttaaaaaaggggg

SEQ ID NO: 220 - protein, 179 aa, Helicobacter pylori
MEKLFEKILHEMRSRTSFLLAFVVSLIVFIFNLKGVFQLIFESIFQYTQNKILSFSLSFFFIFFFFYAIFLIFYQIFLWYGAKKYKQNQRDSEIVYNIQKFPNEIKEELYRCYSKKQNKILRTKKLDDLIDYLDLIGFFKSRDFFEPTKDDYIVKPDVLRAIKKYHKIAFKSVYWQQNK

SEQ ID NO: 221 - DNA, 292 bp, Helicobacter pylori
  CDS (51)...(239)
ttgcccttttcaaaaatataatagctgtattttaaaagctctatccatagcctgagcttggtgatttcgcaagaattggggttaatatccacgccaaaaaggcagttttcaataatggattttttaagattaaaaagttctttttggatgtggtggtgggggtcgttttcgctatctggttttatgtagttaaagatttcacccgttggcgtgtggtgaatgatgatttcatcgttttctaatttaagatcgtagcgatacaaggaagcaataagtcctagctcataagcaa

SEQ ID NO: 222 - protein, 63 aa, Helicobacter pylori
PELGDFARIGVNIHAKKAVFNNGFFKIKKFFLDVVVGVVFAIWFYVVKDFTRWRVVNDDFIVF

SEQ ID NO: 223 - DNA, 340 bp, Helicobacter pylori
  CDS (51)...(287)
taatttaatagtttagctatcatggagcattctaaattaaaggcgatcacatgtttgaaaaaatacgcaagattttagcggatattgaagattcgcaaaatgaaattgaaatgcttttaaaattagcgaatttgagtttgggggattttattgagattaaaagagggagcatggacatgccaaagggcgtgaatgaagcgttttttacgcaattaagcgaagaagtggagcgattgaaggagcttattaacgctttgaataaaatcaaaaaagggttattggtgttttaaatgtgtgggattgtaggttatataggggatagcgagaaaaaatccgttct

SEQ ID NO: 224 - protein, 79 aa, Helicobacter pylori
MFEKIRKILADIEDSQNEIEMLLKLANLSLGDFIEIKRGSMDMPKGVNEAFFTQLSEEVERLKELINALNKIKKGLLVF

SEQ ID NO: 225 - DNA, 3101 bp, Helicobacter pylori
  CDS (54)...(3050)
ggggggcgttgttaatcaatgagcaagaaaagaaaattgaaaataaatagggaatgatccaatccagcctttatagagccttaaacaaaggctttgattaccaaatactcgcttgtaaggattttaaagaatccgagctcgctaaagaagtcataagctattttaagccaaataccaaagccattcttttcccggagtttagggctaaaaaaaacgacgatttgcgttcgttttttgaagaatttttacagcttttagggggtttaagggagttttatcaagccttagaaaacaagcaagaaactatcatcattgccccgattagcgcgttattgcaccctttacctaaaaaagaacttttagaaagctttaaaatcactcttttagaaaaatataaccttaaggatttgaaagacaagctcttttattatggctatgaaattttagacttagtggaagtggaaggcgaagcgagctttaggggggatattgtggatatttatgcgccaaattctaaagcgtatcgcttgagtttttttgacaccgagtgtgagagcattaaggaatttgatcccattactcaaatgagccttaaagaagatttgttagaaattgaaatcccccccacgctttttagtttggacgaatcatcttataaggatctaaaaacaaaagtggaacaaagccccttaaatagcttttctaaagatttaaccagttttggtttgtggtttttaggagaaaaagcacaagacttactaatcgtttataaaagcattataagtcctagagctttagaagaaattcaagaattagcgagcttaaacgaattggattgtgagcgtttcaaatttttaaaggttttagaaaacgcgcaaggctatgaagatttagaaatccatgcgcatgccctagaaggctttatcgctttgcattcaaatcataaaatcacgctcctagcccccaataaaacgattttagacaacgcgataagcgcgcttgatgcaggcaacatggaatgcgtcatcgccccctttgtgttaaactttaaaacccctgatgggatttttatttcgctcaattcttttgaaaggaagaaaaaacgccaaaaatccaagctcgctttgaatgagttgaatccgggcgaatgggtggtgcatgatgattatggggtgggcgtgttttctcaattagtccagcacagcgttttagggagcaagagggattttttagaaatcgcttatttgggcgaagacaaactgctgttaccggtagaaaacttgcatctcatcgctcgctatgtggcgcaaagcgatagcgtgccagctaaagaccggctagggaaagggagctttcttaaattaaaagctaaagtcaggactaagcttttagagattgctagcaagatcattgaattagcggctgaacgcaatttgatcttgggtaaaaagatggatgtgcatttagcggagttggaagtctttaaatcgcatgcggggtttgaatacaccagcgatcaagaaaaggctatcgctgaaatttcaaaggatttaagctctcacagggtgatggatagattattgagtggggatgtgggttttgggaaaacagaagtggcgatgcatgcgattttttgcgcgtttttgaacggctttcaaagcgctttagttgtgcctaccactttattagcgcaccagcattttgagactttaagggcgcgttttgaaaattttggcgttaaagtggctcgtttggacaggtatgcgagcgaaaaaaacaagcttttaaaggcggtggaattagggcaagttgatgcgctaataggcacgcatgcgattttaggcgcgaaattcaaaaacctgggcttggtggtggtggatgaagagcataaatttggcgtgaaacaaaaagaagctttaaaagaattgagtaagagcgtgcattttttaagcatgtccgctacgcctatcccgcgcactctaaacatggcgctctctcaaattaagggcattagttctttaaaaaccccgcccacagacagaaagcccagccgcacttttttgaaagaaaagaatgacgaactcttaaaagagattatttacagagaattacgccgtaacgggcaaattttttacatccataaccacatcgctagcattttaaaagtcaaaaccaagctagaagatttaatccctaaactcaaaatcgctattttgcattcccagattaacgctaatgagagcgaagaaatcatgctagagtttgccaagggaaattatcaggttttattatgcacttctattgtggaatcagggattcatttgcctaacgctaacacgatcattatagataatgcgcaaaatttcgggctggctgatttgcaccaattgagagggcgtgtggggagaggtaaaaaagaaggcttttgttatttcctcatagaagatcaaaaaagtttgaatgaacaggctttaaaacgcttgctcgctttggaaaaaaattcatatttaggcagcggggagagtgtcgcttatcatgatttagaaatcagggggggcgggaatttgctcgggcaagatcagagcgggcatattaaaaacattggttatgcactctatacgcgcatgcttgaagacgcgatttatgaattgagtggggggaagaaaaggcttgaaaagagcgtagaaatccaacttggcgtgagcgcttttttaaaccctgaactcattgcaagcgatagtttgagattggatttataccgccgtttgagtttgtgtgaaaatacagatgaggtggggcaaatccatgaagaaatagaagacaggtttggcaaaatagacgatttgagcgctcaatttttgcaaatcattacgcttaaaattctagccaaccagcttggcatcatcaaactttctaatttcaatcaaaacatcaccatcacttatagcgatgaaaagaaagaaagcctgaaagccccaagcaaagacgataacgatattttagaaacccttttgaaacatttgcgcgctcaaatttctttaaagcggcgttaaaagcgtttgattttagcgttaattttgttattttaaaaagattattaa

SEQ ID NO: 226 - protein, 999 aa, Helicobacter pylori
MIQSSLYRALNKGFDYQILACKDFKESELAKEVISYFKPNTKAILFPEFRAKKNDDLRSFFEEFLQLLGGLREFYQALENKQETIIIAPISALLHPLPKKELLESFKITLLEKYNLKDLKDKLFYYGYEILDLVEVEGEASFRGDIVDIYAPNSKAYRLSFFDTECESIKEFDPITQMSLKEDLLEIEIPPTLFSLDESSYKDLKTKVEQSPLNSFSKDLTSFGLWFLGEKAQDLLIVYKSIISPRALEEIQELASLNELDCERFKFLKVLENAQGYEDLEIHAHALEGFIALHSNHKITLLAPNKTILDNAISALDAGNMECVIAPFVLNFKTPDGIFISLNSFERKKKRQKSKLALNELNPGEWVVHDDYGVGVFSQLVQHSVLGSKRDFLEIAYLGEDKLLLPVENLHLIARYVAQSDSVPAKDRLGKGSFLKLKAKVRTKLLEIASKIIELAAERNLILGKKMDVHLAELEVFKSHAGFEYTSDQEKAIAEISKDLSSHRVMDRLLSGDVGFGKTEVAMHAIFCAFLNGFQSALVVPTTLLAHQHFETLRARFENFGVKVARLDRYASEKNKLLKAVELGQVDALIGTHAILGAKFKNLGLVVVDEEHKFGVKQKEALKELSKSVHFLSMSATPIPRTLNMALSQIKGISSLKTPPTDRKPSRTFLKEKNDELLKEIIYRELRRNGQIFYIHNHIASILKVKTKLEDLIPKLKIAILHSQINANESEEIMLEFAKGNYQVLLCTSIVESGIHLPNANTIIIDNAQNFGLADLHQLRGRVGRGKKEGFCYFLIEDQKSLNEQALKRLLALEKNSYLGSGESVAYHDLEIRGGGNLLGQDQSGHIKNIGYALYTRMLEDAIYELSGGKKRLEKSVEIQLGVSAFLNPELIASDSLRLDLYRRLSLCENTDEVGQIHEEIEDRFGKIDDLSAQFLQIITLKILANQLGIIKLSNFNQNITITYSDEKKESLKAPSKDDNDILETLLKHLRAQISLKRR

SEQ ID NO: 227 - DNA, 1217 bp, Helicobacter pylori
  CDS (46)...(1161)
aggctatgatatagtttattttcacaaaatctccaaggaaaattgatgcaacatgaaatccctattgcctttgcctttgataaaaactacctaaaaacaggggctgtggctctctactctttattgcatgcccatcgtgcagttgaaggggtatttttcagtatctatatattctatagcggtttgaatgaagatgatttaaacaggctccaagaaactatcaaacctttcaaacattttgccgctttaaaatgccaagatattagcgccactcttgattctttgcccaccatcacggatagtgcatgggttaatcgctattctagaatgattttggtcaaataccttctccctagtttattcccccaatacagcaaaatgatttggtctgatgtggatgtggtcttttgcagagctttcgctgatgattttatcgctttagacacaagcgaatcttttcatttgagtggtgtgataagtttagtatcacaatcagttacagaggggttttggttttgcaatttggattacatgcgaaagcactctttcacccaacaggtcttagaaaaatttaaaattcaagtaatgcgtccatattttaaagaacctacattaatacaccatttgcatgcttatattaaagaacttcccttacactattgcgttctgccttattattatcaagaagaacttgatgatttgagacataaagcttccttacccattcggtttgaaatcatccaccaagacaaacccaatgaatttatccatcgccagcaaatcccctatgagatctctcaaattcaaaacattctttcaaaccctattatcatgcactatgaatctgataaagatgctcttggaatctacaatggcaaaccttgggagttccctttggggaatcaataccacctgtggttagagatgcttgcacacactccattttggaaagacttcactctggaaatgcaaaaaaaacgcatagaataccgagatattgctcaaaaaatccattatttttctcaagataagcgtctttatgaagtgagcatacgctccattaaggtttttgcatctcattactataatttagtggttaaagaacgatggtctaaaccaataaaaactttctttcaaaaaaatttttttcaaaaaaagttctaatttgttggaatcacaaggcgaaaccaaatccctaatacttatgctttctcagg

SEQ ID NO: 228 - protein, 372 aa, Helicobacter pylori
MQHEIPIAFAFDKNYLKTGAVALYSLLHAHRAVEGVFFSIYIFYSGLNEDDLNRLQETIKPFKHFAALKCQDISATLDSLPTITDSAWVNRYSRMILVKYLLPSLFPQYSKMIWSDVDVVFCRAFADDFIALDTSESFHLSGVISLVSQSVTEGFWFCNLDYMRKHSFTQQVLEKFKIQVMRPYFKEPTLIHHLHAYIKELPLHYCVLPYYYQEELDDLRHKASLPIRFEIIHQDKPNEFIHRQQIPYEISQIQNILSNPIIMHYESDKDALGIYNGKPWEFPLGNQYHLWLEMLAHTPFWKDFTLEMQKKRIEYRDIAQKIHYFSQDKRLYEVSIRSIKVFASHYYNLVVKERWSKPIKTFFQKNFFQKKF

SEQ ID NO: 229 - DNA, 780 bp, Helicobacter pylori
  CDS (250)...(729)
tttagctatgataagcgttttaaaaacaaacgaattttaatcaaaatgagatttaagggttaaagagtgaaagcgtttttaggagcgttagagtttcaagagaatgaatatgaagagcttaaagagctttatgagagcttaaaaaccaagcaaaagccccacactttgttcatttcttgtgtggattcacgagtcgtgcctaatttaatcactggcaccaaaccgggcgaattgtatgtgatttgcaacatgggcaatgtgaacccccctaaaacaagctataaagagtccctttctaccattgcgagcattgaatacgctatcgcgcatgtgggcgttcaaaacttaatcatttgcgggcatagcgattgtggggcttgcgggagcgttcatttaatccatgatgaaaccaccaaagctaaaaccccttacattgcaaactggatacaatttttagagcctgttaaagaagagttaaaaaaccacccgcaattcagcaaccatttcgccaagcgttcatggcttacagagcgtttgaatgcgcgcttgcaactcaacaacctcttaagctatgatttcattcaagagaaagcgagcaagaatgaattaaaaatttttggttggcactacatcatagaaacaggcaggatttataattataattttgaaagccatttttttgagccgattggagaaaccattaaacaaaggaaaagtcatgaaaacttctaaaacaaaaacccctaaatccgttttaatcgctgggccatgcgtcattga

SEQ ID NO: 230 - protein, 160 aa, Helicobacter pylori
MGNVNPPKTSYKESLSTIASIEYAIAHVGVQNLIICGHSDCGACGSVHLIHDETTKAKTPYIANWIQFLEPVKEELKNHPQFSNHFAKRSWLTERLNARLQLNNLLSYDFIQEKASKNELKIFGWHYIIETGRIYNYNFESHFFEPIGETIKQRKSHENF

SEQ ID NO: 231 - DNA, 450 bp, Helicobacter pylori
  CDS (107)...(385)
taaagataaaaaccaccccttttgacccccttttagaggatttttatggtttttttgagataataaagacttataaagttaattaaaattaaacagaagggttttgatgtccgctcattttttaaaaatcgtttttttagtaggcatgtgcgtttcaagtttgttcgctgaaggtttagaggggttttttaacgccctagaagcccagctcaaaagccccatcgctaaggggattttaatggtgattttcatagggatcgctatttatgtgtggaggaatttggaccggtggaaagagatcttattcacgatccttggcgtggtgtttgggatttttttattctttaaagctccgagtttagcgaattggtttatgggaattttttaatgattatcctgtcagcgagcgtgaagaatttgcgtgaaatttcggttaaagaaaaattttta

SEQ ID NO: 232 - protein, 93 aa, Helicobacter pylori
MSAHFLKIVFLVGMCVSSLFAEGLEGFFNALEAQLKSPIAKGILMVIFIGIAIYVWRNLDRWKEILFTILGVVFGIFLFFKAPSLANWFMGIF

SEQ ID NO: 233 - DNA, 1349 bp, Helicobacter pylori
  CDS (77)...(1291)
tgaaggccgatgatttcatttccaagtctaaccccaaagacatccagcgagtggttaagcaatttttggaattagcatgaaaaaatacagcactatccccaccccttgctacgtgttagagagcgaacgcttagaaaaaaacgccaagattttagaaatcgtgcgccaacaaagtggggcaaaggtcttgcttgctttaaaggggtatgcgttttggcgtgagtttgggattttgaggcaaaaattgaacgggtgttgcgcgagcggtctttatgaggctaagctcgcttttgaagaatttggggggcgagagagccacaaagaaatttgcgtttatagcccggctttcaaagaggctgaaatgagcgcgattttacccctagcgacaagcattatttttaactctttttaccaatacgctacctataaagacaggattttagataaaaacaagcaattagaaaacttgggcttaagccccattaaaatgggtttgaggataaaccctctctatagcgaagtaaccccagcgatctataacccatgctctaaagtgagccggttagggattacgcctagcggatttgaaaagggggtgaaagagcatggcttagagggggtgagcgggttgcatttccatacgcattgcgagcaaaacgctgacgctttgtgccggactttagagcatgtagaaaagcatttcaggccctatttagaaaacatggcgtgggtgaattttggtggggggcatcatatcactaagagcgattatgatgtgaatttgctcatccaaacgattaaggatttcaaagaacgctatcataatatagaagtgattttagagcctggggaagccatagggtggcaatgcgggtttttaatcgcaagcgtgatagacatcgttcaaaacgatcaagaaattgcgattctagacgcttcttttagcgctcacatgcccgattgcttagaaatgccttatcgccctagcatttttaaagtctccgtagaaaatgatgaagagcttattgaagttgaaaagggcgaaaatcaaggggcgttttcttattttttaggcggccctacttgtttagcgggggattttatggggagttttagctttgaaacgcctttaaaaaggggcgataaaatcgtgtttcaagacatgctccattatacgattgtcaaaaacaactcgtttaatggcgtgccgctcccaagcctggctagattggatcaacaagggtttaaaatccttaaaaacttttcttatgaagactataaaaacagaaactaaagcttttgattaaggctttttggggcttgtaaaaagttacgcacaacattccaac

SEQ ID NO: 234 - protein, 405 aa, Helicobacter pylori
MKKYSTIPTPCYVLESERLEKNAKILEIVRQQSGAKVLLALKGYAFWREFGILRQKLNGCCASGLYEAKLAFEEFGGRESHKEICVYSPAFKEAEMSAILPLATSIIFNSFYQYATYKDRILDKNKQLENLGLSPIKMGLRINPLYSEVTPAIYNPCSKVSRLGITPSGFEKGVKEHGLEGVSGLHFHTHCEQNADALCRTLEHVEKHFRPYLENMAWVNFGGGHHITKSDYDVNLLIQTIKDFKERYHNIEVILEPGEAIGWQCGFLIASVIDIVQNDQEIAILDASFSAHMPDCLEMPYRPSIFKVSVENDEELIEVEKGENQGAFSYFLGGPTCLAGDFMGSFSFETPLKRGDKIVFQDMLHYTIVKNNSFNGVPLPSLARLDQQGFKILKNFSYEDYKNRN

SEQ ID NO: 235 - DNA, 609 bp, Helicobacter pylori
  CDS (246)...(548)
gaatctttactttataatttgcctgaccttttaaaagaacactctaatgaaaatgtcttgctcatcttacacttgcaggctcgcatggcccaaactacgacaacaaagtgcctttaaattttagggtgtttaagccttattgctcaagcgctgatctgtcttcttgctccaaagaaagcctgattaacgcctatgacaacaccattttttacaacgactatctgctagatcgaaagatcattagcatgcttgaaaacgccaagcagcccgccttaatgatctatttaagcgatcatggcgaaagtttgggcgaagaagcgttctatttgcatggcattcctaaaagcatcgcccccaaagaacaatacgagatcccctttatcgtttatgctaatgagcctttcaaagaaaagcattccatcattcaaacccaaacccccattaatcaaaatgtgattttccatagcgttttaggggtgtttttggattttaaaaacccaagcgttgtttatcgcccttctttagatctgcttaaacacaaaaaagagtaaaataacacgcatgaaaaaattcttatttaaacaaaaattttgtgaaagcctgcccaaa

SEQ ID NO: 236 - protein, 101 aa, Helicobacter pylori
MLENAKQPALMIYLSDHGESLGEEAFYLHGIPKSIAPKEQYEIPFIVYANEPFKEKHSIIQTQTPINQNVIFHSVLGVFLDFKNPSVVYRPSLDLLKHKKE

SEQ ID NO: 237 - DNA, 872 bp, Helicobacter pylori
  CDS (123)...(818)
agttttagcgataattatatcttttatggcaataaaacgagcgtttgtaagcaaatcggtaacgctgtgcctcctcttctagccctagccttaggcaaagcgatcttaaaaagcttaagaaaatgatacaaatttatcacgctgacgcttttgaaatcatcaaagacttttaccagcaaaatttaaaagtggatgcgatcatcacggaccctccttataacatttcggttaaaaacaattttcccaccctaaagagcgctaaaaggcaaggcatagattttggggaatgggataaaaatttcaagcttttagaatggatcgcacgctacgcccccttagtcaatccaaacggctgcatggttattttttgctcttacaggtttataagctatatcgctgattttttagaagaaaacggctttgtggtcaaagactttatccaatgggttaaaaataatcccatgccaagaaacattcaccggcgttatgtccaagacacggaatttgctctgtgggcggttaaaaagaaagccaagtgggtgtttaacaaacccaaaaatgaaaaatatttacggcctttgattttaaaaagccctgtggtaagcgggcttgaaaaaaccaaacaccccacgcaaaaaagcctggccttaatggaaaaaatcatttccatccacacaaaccctaatgacatcgtgctagatcctttcatggggagcggcaccaccggcttagcgtgcaaaaatttagaacggaattttatcggcatagaatcagaaaaagaatattttcaaaccgctaaaaagcgtttgaatctgttttaaaaacgctatttgaatgagattgtgttatagttatttaaaaggatattttga

SEQ ID NO: 238 - protein, 232 aa, Helicobacter pylori
MIQIYHADAFEIIKDFYQQNLKVDAIITDPPYNISVKNNFPTLKSAKRQGIDFGEWDKNFKLLEWIARYAPLVNPNGCMVIFCSYRFISYIADFLEENGFVVKDFIQWVKNNPMPRNIHRRYVQDTEFALWAVKKKAKWVFNKPKNEKYLRPLILKSPVVSGLEKTKHPTQKSLALMEKIISIHTNPNDIVLDPFMGSGTTGLACKNLERNFIGIESEKEYFQTAKKRLNLF

SEQ ID NO: 239 - DNA, 1181 bp, Helicobacter pylori
  CDS (60)...(1124)
ttgcgttttgaaaccgatgatttttcaacgcttattgatcgtatttgtgaaagcttgaaatgaattataaaattttagatttattttgtggggctgggggttttagcgctgggttagagtgtttagaagagtttgacgctttaatagggctagattgcgataaacaagccctaatcacttttgaaaacaaccataaaaacgccataggcgtttgtggggacatcactcaaaccgaaattaaagaaaaagtcatcaaactagctaaaaaattagaaatcaacatgatcattggcgggcctccatgtcaaggcttttctaataaagggaaaaatttagggctaaaagaccctaggaattttttattcttagaatatatagaaatagtcaaagccataaagccagaaatttttatcattgaaaacgtgaaaaacctcatctcttgcgctaaaggctattttttagaagaaattaaagaaaggttgaacgctttagggtatcaattgagctatcaaatcctaaacgctaaagattatggcgtgcctcaaaacagagagagagcctttattgtaggggctagtcgtttcagttttgatttcaatcttttagagccttctcaaagcgtgaatgttcaagatgccataagcgatttagcctatctttgttctaatgagggggcgtttgagagcgattatttaaaccctatccaatcaagctatcaagctttaatgcgaaaagatagccctaaattatacaaccatcaagccaccaaccactcgcaagccgctttagagaaattaaaactcattaacaaagaacaaggcaaagaatgcttgcctaaaaacttgcatggcaaacagcaattcaaaagcacatgggggcgcctgaattggaataaaatcagccccaccatagacacacgatttgacactcccagcaatggcaccaactcccaccccgaattgcaccgctctatcacgcctagagaagccgctaggatacaaagttttagcgataattatatcttttatggcaataaaacgagcgtttgtaagcaaatcggtaacgctgtgcctcctcttctagccctagccttaggcaaagcgatcttaaaaagcttaagaaaatgatacaaatttatcacgctgacgcttttgaaatcatcaaagacttttaccagcaaa

SEQ ID NO: 240 - protein, 355 aa, Helicobacter pylori
MNYKILDLFCGAGGFSAGLECLEEFDALIGLDCDKQALITFENNHKNAIGVCGDITQTEIKEKVIKLAKKLEINMIIGGPPCQGFSNKGKNLGLKDPRNFLFLEYIEIVKAIKPEIFIIENVKNLISCAKGYFLEEIKERLNALGYQLSYQILNAKDYGVPQNRERAFIVGASRFSFDFNLLEPSQSVNVQDAISDLAYLCSNEGAFESDYLNPIQSSYQALMRKDSPKLYNHQATNHSQAALEKLKLINKEQGKECLPKNLHGKQQFKSTWGRLNWNKISPTIDTRFDTPSNGTNSHPELHRSITPREAARIQSFSDNYIFYGNKTSVCKQIGNAVPPLLALALGKAILKSLRK

SEQ ID NO: 241 - DNA, 1361 bp, Helicobacter pylori; identical to SEQ ID NO: 29
  CDS (49)...(1305)

SEQ ID NO: 242 - protein, 419 aa, Helicobacter pylori; identical to SEQ ID NO: 30

SEQ ID NO: 243 - DNA, 2610 bp, Helicobacter pylori
  CDS (90)...(2558)
taaagaggcttttgaaaccatgcttaaagaaattgagagcttgaaacattaatgcttcaaatgaatttggtttaatccttaatccccttatgctctttgatcaaaccttaacctatatttctttattttctggggcaggagtggggtgctatgggcttttagaagaggggtttgaatgcgttgctaccaatgaaattttagaaaaacgcttgaatatccaaaggattaatcgcaaatgcaaattagatgaaagctacattagtggggacattaaaaagccagaaacaaaagaaaaaattttaaagcaaattgaattttattctaaaaaatttggtaatgatagggttgatttagtggtagcaaccccaccttgtcaaggcatgagcgtagccaatcataagaagaaaaacgatgagatcaaacggaattctttggtggttgaaagcattgatttgatcaaacaaatcaaacccagattttttattttagaaaatgtccctagtttttataaaacaggttgtatagacaaaaatgataatttgctagaaataggatctatgatagagcaaaatttgagtggcgattatatgctctatgatgaggtaatcaattttaaaaattttggagctaattcaagccgaacaagaactttagtgataggggtttgtaaagagtttaaagattttataagcgcgttagaattttttcctgatttcaaacaagaaaaaaccttaaaagaagtgataggatcgttaaaaccacttgcttggggcgagtatgacaacacggatttttatcatagttttagaacttatccaaagcatatgcaagaatggattaaggatttaaaagaaggacaaagcgcgtttgagaatacagaattaaacaaaaaacctcatagaattgttggcagtaagattgtcttaaatgtttctaaaaatggcgataaatataaaagacaaaaatatcatagcgttgccccttgcattcatacaagaaacgaccaaatggctagccaaaacacgatccaccccaaagatgatagagtgttttccattagagagctgatgcttttaatgaatatccctagccgttttaagtggttagatttagaattacaagaattaaacgcccttaaccaacaagaaaaagaaaaaatctccaaacaaaacgaaatgaatataagacaaagcatcggtgaagctgttccaacgattatttttaagcaaattgccataaagataaaaaatttcatgtctcaaacccacttagagcctaaagaaatcattaggcttattgatgtgcaccatttattagagccacaaaatttgaagcgatttattttagaaaatcaaaacaagattgcaagagcgagtttagtgagtttggcagaaatgtctaattctaaacgcatagaaaaaagcgcgtattttacaaacccttttattattaatgaaatagcgaagttattgccaagctttaaacaagagagtgttactattatagagccaagtgcagggtgtgggaatttcttaagtgctctttttaaaaaatacacttctgttaaaaaagtttatttaaagtgtatagatattgataaaaatagtttagaaattttagagattttatataaagattgcattcctaacaattttgagatggaattgatttgcaaagattttctagcctatgaatgcggcaaagtggatttaattgtgggcaatccgccttttggcaaaacgcatgaaagattcaaagattatagtttaagactcactcatttagcagggatttttttagaaaagtctttaaaactagccaactttacagcgatggttatgcctaaaaaccttttaaacactaaagagtatgcagaaactagaactaagcttgaaaaaaagggagtaggagcgattttagactttggcgagcttggttttaagggtgttttggtagaaacaattgctattgttacacaaaaatcaaaagaagttttagcgcgttcgttacccctaaatctaagcatcaagcaaaagccaagctatatttttgacaaacaattgccctattgggttatctatcgcaacgctttttttgataaggtgtttcattccatgcagtttggtctttttgaagtgtttagagacagacaaatcactaattctgtgttggttaaaaatggtattcgtgtgattaaatctcgcaatattgatgaaaacggaaagattattagcattgaaaattacgatagctacattcaaaaagaggttttaagtccgtttaagatagcttcatttttagacagagatgatgtctatttaacccccaacatgacctataagccaaggattttaaaaaaagaaaaaggctatgtggttaatggctctgtggctattttaatccctaaaaaccccatatctttaagcaagaaacaatgcgattatatctctagcgttgaatttagagatttttataaaatcgctaggaattatcaaacgcgcaccttaaatattgatagcatgagttgtttttggtttggaattttaaggagtagcttatgaaagagcaatcaatgattgattttttaaaacttagagattatgacattag

SEQ ID NO: 244 - protein, 823 aa, Helicobacter pylori
MLFDQTLTYISLFSGAGVGCYGLLEEGFECVATNEILEKRLNIQRINRKCKLDESYISGDIKKPETKEKILKQIEFYSKKFGNDRVDLVVATPPCQGMSVANHKKKNDEIKRNSLVVESIDLIKQIKPRFFILENVPSFYKTGCIDKNDNLLEIGSMIEQNLSGDYMLYDEVINFKNFGANSSRTRTLVIGVCKEFKDFISALEFFPDFKQEKTLKEVIGSLKPLAWGEYDNTDFYHSFRTYPKHMQEWIKDLKEGQSAFENTELNKKPHRIVGSKIVLNVSKNGDKYKRQKYHSVAPCIHTRNDQMASQNTIHPKDDRVFSIRELMLLMNIPSRFKWLDLELQELNALNQQEKEKISKQNEMNIRQSIGEAVPTIIFKQIAIKIKNFMSQTHLEPKEIIRLIDVHHLLEPQNLKRFILENQNKIARASLVSLAEMSNSKRIEKSAYFTNPFIINEIAKLLPSFKQESVTIIEPSAGCGNFLSALFKKYTSVKKVYLKCIDIDKNSLEILEILYKDCIPNNFEMELICKDFLAYECGKVDLIVGNPPFGKTHERFKDYSLRLTHLAGIFLEKSLKLANFTAMVMPKNLLNTKEYAETRTKLEKKGVGAILDFGELGFKGVLVETIAIVTQKSKEVLARSLPLNLSIKQKPSYIFDKQLPYWVIYRNAFFDKVFHSMQFGLFEVFRDRQITNSVLVKNGIRVIKSRNIDENGKIISIENYDSYIQKEVLSPFKIASFLDRDDVYLTPNMTYKPRILKKEKGYVVNGSVAILIPKNPISLSKKQCDYISSVEFRDFYKIARNYQTRTLNIDSMSCFWFGILRSSL

SEQ ID NO: 245 - DNA, 3666 bp, Helicobacter pylori
  CDS (54)...(3608)
cccgcttaaaacatgctacaatcaagtcaaattcttaaataaaaggtaagctcatgcaaaaaatcattgacgattcgctagaattagctaaaaaactgcaagatagtatcagtaaccatttgagcgatcaggaaaaagcgttccactctaaaatgcaaaagcttttaaacaaccctgaaaacaaagtcatgctcatagagcttatggatcggagtttcaggtgcttggacaataaagcccgctttgaaatgattgagcatgttttagacaaatacaaaagccgtgagattttttctccgtttgaaaaagtgcttttaatggggtttttaagctttgggaaaatgctccctgatatgagcgtgcctttctttgtcaataaaatcagaagcgacacgaaagcgatggtcttggatcaagaagagagccagttaaaagagcggattttaaaaagaaaaaatgaaaaaatcattttgaatgtgaattttattggcgaagaggttttaggcgaagaagaagctaatgcgcgttttgaaaaatactctcaagccctaaaatccaactacatccaatacatttccattaaaatcacgacgattttttctcaaatcaatatccttgattttgaatactctaaaaaagagattgtcaaacgcctagacgctctttacgccctggctttagaagaagaaaaaaaacaaggcatgcctaaattcatcaatttggatatggaagaatttagggatttagagctaacagtggagtcgtttatggaatccatcgctaaatttgatttgaacgctggtattgtgctgcaagcctatattccggattcttatgaatatttgaaaaaactgcacgctttttctaaagaaagggttttaaaagggttgaagcccattaaaatccgctttgttaagggagcgaacatggagagcgaagaaactatcgcttccgtgaaagattgggcgttacccacattttccaataagcaagacaccgattctaattacaataaaatgttggattttgttttagagggcgataattataaatacattcatattggcgcagcgagtcataatatttttgaaatcgcttatgtctatacgcgtatccatgccattaatgatcctgttgtgttagagcatttcagctttgaaatgctagagggcatgagtttgcaagcgagccaggaactaaaagagatgcacaagctcattctttatgcgccggtgtgcgatgaagcgcattttaacaatgcgatcgcttacttggtgaggaggttagacgaaaacacctcaagcgataatttcatgaaggctttctttaacctcaaagtaggcacgagcgaatggaaagatcaagaacaacgctttttaaacagccttaaaggaattgccactttagacaatgccacccataggactcaagataggaacgccaaacaaagcgggcataccacttacccaaaccactcctttaaaaacgaaagcgataccgattttattttaaaagccaaccgagaatgggctaaaaaagtgcgcgagaaaatgcgtaacgctcctattttagagctttacccagagatggatgggaggtttgaagatcctaatctaacccctttagaagtctttgatagaatccatcataaaaaaatcgctagcgtgcatttagcggataaggaagcgattttaaaagccctagaagtggctaaaagcgataagagccgtttcagtcaaaaaagctttacagaaatccatgccttaatgagtcaaaccgcccagctttttagagaaagaagaggcgatttgatagggatttccgctttagaagtgggtaagactttcgctgaaacggacgctgaagtgagcgaagccattgactttttagagttttacccttacagcttaagggtgttgcaagagcaaaacacaaaaacgcaattcacccctaaaggcgtgggcgtggtcattgccccatggaatttccctgtgggcatttctgtaggcactatcgctgcccccctagctacgggcaatcgggtgatttacaagccctcaagtttgtctagcgtaacgggctataagctttgtgagtgcttttgggatgcgggcgtgcctagagatgcgctcatttacttgccctctaaagggagcgatattagcgaacatcttttaagagatgaaagcatccagtttgccattttaaccgggggcgaagacaccgcttataaaatgttaaaagctaaccccactttagccttgagcgctgaaacaggcggtaaaaacgccaccattgtgagcaaaatggcagacagagaccaggcgattaagaatgttatccattcagcttttagcaattcggggcaaaaatgctccgccacttcgcttttagtattagaaaaagaagtctatgaagatgagaactttaaaaagactctaatagatgcgactctaagccttagcgtgggcgatccttttgatttcaaaaacaaaatcggcgctctagcggacaagcctaatgaaaaggtcatcaaagccatagatgaattaaaaagctatgaaaattacgaaatcccggtaagctttgtcaatgataacccctatttgatgaagccaagcatcaaatacggcactaaaaaaggcgatttcacgcaccaaactgagctttttacgcccattttatccgtgatggaagcaaaagatttagacgaagcgatagaaatagccaattctaccggttacgggctgactagcgcgttagagtcgttggacgaaagggagtgggaatattatttagaacgcattgaagccggtaatatctatatcaacaagcccaccacaggagcgattgtcttgcgccagccttttgggggggttaaaaaatccgctgtggggtttgggaggaaagtaggcattttcaactatatcacgcaatttgtgaatatctgccaagaagaagaagacgaaaacgccttaaaaaaccccttaagcgaagccttagaaaacttaactcaaaaaggctatgatgagcatacgcatgagttgaagcgcgcgatttttatggcaaaaagctacgcttatcattacaaacatgaattcagccaaactaaagactatgtcaaaatcagaggcgaagacaaccttttttcctacactaaagttaaaagcgtgggctatcgcatcaccgaaaaggacactttaagcgacatgttaggcgttgctttagcatgtttaatttctcaaatccctttaacgctcagcatagaaaacgaacgaacgaacaaagatttaacctttttcttagaatgcttaaaagcgctccaagcaagcgcccctattgtttatgaaagcttgcaaaaatttagcgagaaattgaatactttcaatcgtgtccgttatctcaaaagcgatttggatttattgcacgaacaagcgagcgctttagggatggttttagccacggctaaaccatgcctaaatgggcgttttgaattgctgtattaccacttagagcgatcggttagcatctcttatcaccgttatgggaatttaggctcaagggttttaaggcaacccacttgccacaaatcatgctgtgctgaaaaataaatattgtattaaataaggagatcaaaatgggacatgttgttttaagtacccctat

SEQ ID NO: 246 - protein, 1185 aa, Helicobacter pylori
MQKIIDDSLELAKKLQDSISNHLSDQEKAFHSKMQKLLNNPENKVMLIELMDRSFRCLDNKARFEMIEHVLDKYKSREIFSPFEKVLLMGFLSFGKMLPDMSVPFFVNKIRSDTKAMVLDQEESQLKERILKRKNEKIILNVNFIGEEVLGEEEANARFEKYSQALKSNYIQYISIKITTIFSQINILDFEYSKKEIVKRLDALYALALEEEKKQGMPKFINLDMEEFRDLELTVESFMESIAKFDLNAGIVLQAYIPDSYEYLKKLHAFSKERVLKGLKPIKIRFVKGANMESEETIASVKDWALPTFSNKQDTDSNYNKMLDFVLEGDNYKYIHIGAASHNIFEIAYVYTRIHAINDPVVLEHFSFEMLEGMSLQASQELKEMHKLILYAPVCDEAHFNNAIAYLVRRLDENTSSDNFMKAFFNLKVGTSEWKDQEQRFLNSLKGIATLDNATHRTQDRNAKQSGHTTYPNHSFKNESDTDFILKANREWAKKVREKMRNAPILELYPEMDGRFEDPNLTPLEVFDRIHHKKIASVHLADKEAILKALEVAKSDKSRFSQKSFTEIHALMSQTAQLFRERRGDLIGISALEVGKTFAETDAEVSEAIDFLEFYPYSLRVLQEQNTKTQFTPKGVGVVIAPWNFPVGISVGTIAAPLATGNRVIYKPSSLSSVTGYKLCECFWDAGVPRDALIYLPSKGSDISEHLLRDESIQFAILTGGEDTAYKMLKANPTLALSAETGGKNATIVSKMADRDQAIKNVIHSAFSNSGQKCSATSLLVLEKEVYEDENFKKTLIDATLSLSVGDPFDFKNKIGALADKPNEKVIKAIDELKSYENYEIPVSFVNDNPYLMKPSIKYGTKKGDFTHQTELFTPILSVMEAKDLDEAIEIANSTGYGLTSALESLDEREWEYYLERIEAGNIYINKPTTGAIVLRQPFGGVKKSAVGFGRKVGIFNYITQFVNICQEEEDENALKNPLSEALENLTQKGYDEHTHELKRAIFMAKSYAYHYKHEFSQTKDYVKIRGEDNLFSYTKVKSVGYRITEKDTLSDMLGVALACLISQIPLTLSIENERTNKDLTFFLECLKALQASAPIVYESLQKFSEKLNTFNRVRYLKSDLDLLHEQASALGMVLATAKPCLNGRFELLYYHLERSVSISYHRYGNLGSRVLRQPTCHKSCCAEK

SEQ ID NO: 247 - DNA, 810 bp, Helicobacter pylori
  CDS (107)...(673)
agcatgaagaagtggatgtgaaggtgtgcagtatagattcacaaagcattaaagtggggctgtttaaagataaccaattaatctatgaaagcgaggcagaaaaattatgatgactaagaacgcgtatgcgtttgttgtgattgaagaaagcgttatggtgtttaaacgcaccaaagatgaggggttaatgcctatctttgaaggctttgtgcctttaaaagagggctttttgaaaagttttaaagagcgttgcaatttggaatttttagaaaatttagaccttttgtttttgtatgacaaaccatccgcacacgagatcttttccttgtgcaaggagctgaaaaattccatctgggacaggaagcttgtggtagcgctagtggaggctttagaggggtttaaggattggaatttgtcgcttaaaatagaagacaagcgttctaacagcttgggtaatggcaccaaaaaattgctcaccaacgctgatttagggagcgactataaaacaatcgtgatagacagcatgaaaacataccaccaaagccagcaagaaaaatataaaagagaaagaggcgaaacgctagaggttcgccccacaacaccccctagctatgggggtggaagcattagaatcagcggcgataaaaagcctgattttgatgaagaaaatttttaaaagaaaggacaaccgatgagcagagtgcaaatggataccgaagaggtcagggaatttgtagggcatttagaacgctttaaagagttactaagagaggaagtgaacagcttgagtaatcatttccataatttaga

SEQ ID NO: 248 - protein, 189 aa, Helicobacter pylori
MMTKNAYAFVVIEESVMVFKRTKDEGLMPIFEGFVPLKEGFLKSFKERCNLEFLENLDLLFLYDKPSAHEIFSLCKELKNSIWDRKLVVALVEALEGFKDWNLSLKIEDKRSNSLGNGTKKLLTNADLGSDYKTIVIDSMKTYHQSQQEKYKRERGETLEVRPTTPPSYGGGSIRISGDKKPDFDEENF

SEQ ID NO: 249 - DNA, 940 bp, Helicobacter pylori
  CDS (58)...(852)
agaaggcttagacgatgtgatcgcttggatcaagcgcaacgctttattggaagattgatgaacacttacgctcaagaatccaagctcaggttaaaaaccaaaataggggctgatgggcggtgcgtgattgaagacaattttttcacgcccccctttaagctcatggcgcccttttaccctaaagacgatttagcggaaatcatgcttttagcggtaagccctggcatgatgaggggcgatgcgcaagatgtgcaattaaacatcggtccaaattgcaagttaaggatcacttcgcaatcctttgaaaaaatccataacactgaagatgggtttgccagcagagacatgcatattgttgtgggggaaaacgcttttttagattttgcgcctttcccgttaatcccctttgaaaacgcgcattttaagggcaacaccacgatttctttgcgctctagctctcaattgctctatagtgaaatcattgtcgcagggcgagtggcgcgcaatgagttgtttaaattcaaccgcttgcacaccaaaatctctattttacaagatgagaaacccatctattatgacaacacgattttagatcccaaaaccaccgacttaaataacatgtgcatgtttgatggctatacgcattatttgaatttggtgcttgtcaattgccccatagagctctctggtgtgcgagaatgcattgaagaaagcgaaggggtggatggggcagtgagtgaaaccgctagttctcatttatgcgtgaaagctttagcgaaaggctcagaacccttattgcatttaagagaaaaaatcgctcgcttggttacgcaaaccaccacgcaaaaggtttgaaagcacttcaaaaagattaaagtcctttagtctttttactcccccctttttttgaccctataagctgaaaggcctgaattcagta

SEQ ID NO: 250 - protein, 265 aa, Helicobacter pylori
MNTYAQESKLRLKTKIGADGRCVIEDNFFTPPFKLMAPFYPKDDLAEIMLLAVSPGMMRGDAQDVQLNIGPNCKLRITSQSFEKIHNTEDGFASRDMHIVVGENAFLDFAPFPLIPFENAHFKGNTTISLRSSSQLLYSEIIVAGRVARNELFKFNRLHTKISILQDEKPIYYDNTILDPKTTDLNNMCMFDGYTHYLNLVLVNCPIELSGVRECIEESEGVDGAVSETASSHLCVKALAKGSEPLLHLREKIARLVTQTTTQKV

SEQ ID NO: 251 - DNA, 1815 bp, Helicobacter pylori
  CDS (51)...(1757)
atggcgctaaaagcgatgacaactatgtaaaaacaattaaggagtaagaaatgaaaaagattagcagaaaagaatatgtttctatgtatggccctactacaggcgataaagtgagattgggcgatacagacttgatcgctgaagtagaacatgactacaccatttatggcgaagagcttaaattcggtggcggtaaaaccctgagagaaggcatgagccaatccaacaaccctagcaaagaagaattggatctaatcatcactaacgctttaatcgtggattacaccggtatttataaagcggatattggtattaaagatggcaaaatcgctggcattggtaaaggcggtaacaaagacatgcaagatggcgttaaaaacaatcttagcgtaggtcctgctactgaagccttagccggtgaaggtttgatcgtaactgctggtggtattgacacacacatccacttcatttcaccccaacaaatccctacagcttttgcaagcggtgtaacaaccatgattggtggcggaactggtcctgctgatggcactaatgcgactactatcactccaggcagaagaaatttaaaatggatgctcagagcggctgaagaatattctatgaacttaggtttcttggctaaaggtaacgcttctaacgacgcgagcttagccgatcaaattgaagctggtgcgattggctttaaaatccacgaagactggggcaccactccttctgcaatcaatcatgcgttagatgttgcagacaaatacgatgtgcaagtcgctatccacacagacactttgaatgaagccggttgcgtggaagacactatggcagctattgccggacgcactatgcacactttccacactgaaggtgctggcggcggacacgctcctgatattattaaagtagctggtgaacacaacattcttcccgcttccactaaccccactatccctttcactgtgaatacagaagcagaacacatggacatgcttatggtgtgccaccacttggataaaagcattaaagaagatgttcagttcgctgattcaaggatccgccctcaaaccattgcggctgaagacactttgcatgacatggggattttctcaatcaccagctctgactctcaagctatgggtcgtgtgggtgaagttatcactagaacttggcaaacagctgacaaaaacaaaaaagaatttggccgcttgaaagaagaaaaaggcgataacgacaacttcaggatcaaacgctacttgtctaaatacaccattaacccagcgatcgctcatgggattagcgagtatgtaggttctgtagaagtgggcaaagtggctgacttggtattgtggagtcccgcattctttggcgtaaaacccaacatgatcatcaaaggcgggttcattgcgttgagtcaaatgggtgacgcgaacgcttctatccctaccccacaaccagtttattacagagaaatgttcgctcatcatggtaaagccaaatacgatgcaaacatcacttttgtgtctcaagcggcttatgacaaaggcattaaagaagaattagggcttgaaagacaagtgttgccggtaaaaaattgcagaaacatcactaaaaaagacatgcaattcaacgacactaccgctcacattgaagtcaatcctgaaacttaccatgtgttcgtggatggcaaagaagtaacttctaaaccagccaataaagtgagcttggcgcaactctttagcattttctaggattttttaggagcaacgctccttaaatccttagtttttagctctctgatttttt

SEQ ID NO: 252 - protein, 569 aa, Helicobacter pylori
MKKISRKEYVSMYGPTTGDKVRLGDTDLIAEVEHDYTIYGEELKFGGGKTLREGMSQSNNPSKEELDLIITNALIVDYTGIYKADIGIKDGKIAGIGKGGNKDMQDGVKNNLSVGPATEALAGEGLIVTAGGIDTHIHFISPQQIPTAFASGVTTMIGGGTGPADGTNATTITPGRRNLKWMLRAAEEYSMNLGFLAKGNASNDASLADQIEAGAIGFKIHEDWGTTPSAINHALDVADKYDVQVAIHTDTLNEAGCVEDTMAAIAGRTMHTFHTEGAGGGHAPDIIKVAGEHNILPASTNPTIPFTVNTEAEHMDMLMVCHHLDKSIKEDVQFADSRIRPQTIAAEDTLHDMGIFSITSSDSQAMGRVGEVITRTWQTADKNKKEFGRLKEEKGDNDNFRIKRYLSKYTINPAIAHGISEYVGSVEVGKVADLVLWSPAFFGVKPNMIIKGGFIALSQMGDANASIPTPQPVYYREMFAHHGKAKYDANITFVSQAAYDKGIKEELGLERQVLPVKNCRNITKKDMQFNDTTAHIEVNPETYHVFVDGKEVTSKPANKVSLAQLFSIF

SEQ ID NO: 253 - DNA, 934 bp, Helicobacter pylori
  CDS (51)...(881)
gagatctacaatttgagcaatgtaaatgattttatatcaaaggcacaaaaatggtaatcgcgcattctaatgaaatcgcacgccccatttttaaaagccaagaccagcttttcactctttatcaaggggattgtaatgaggttttgccccaatttgaaaaccagtttgatttgatttttgctgatccgccttatttcctctctaatgacggcttaagcatacagagcggtaaaatcgtgagcgtcaataaaggcgattgggataaagaagatgggattaatggtattgatgagtttaattaccagtggataaacaacgctaaaaaggctttaaaagacacaggaagccttttaatcagcgggacttaccacaacatcttttctttggggtgtgttttacaaaaattggattttaagattttaaacctcatcacctggcaaaaaaccaaccctcctcccaatttcagctgccgttatttgacgcattcagctgagcaaatcatttgggcgagaaaaagccgcaaacacaagcatgtttttaactatgaggttttaaaaaagatcaataacgacaagcaaatgcgcgatgtgtggagcttcccagcgatcgctccttgggaaaaagttaatggcaagcaccccactcaaaaacccctcgctttattagtgcgcttgcttttaatggcgagcgatgaaaattctctcattggcgatccttttagcgggagctctaccacaggcattgcggctaatcttttgaagagggaatttattggcatagaaaaagaaagcgagtttatcaaaatatccatggatagaaaaatagaattagacgctcgctataaagaaatccgatctaaaatcaaagatttaaaccaccaataaagcctttttttaagccactttaagcgttatacttttgggattttacctca

SEQ ID NO: 254 - protein, 277 aa, Helicobacter pylori
MVIAHSNEIARPIFKSQDQLFTLYQGDCNEVLPQFENQFDLIFADPPYFLSNDGLSIQSGKIVSVNKGDWDKEDGINGIDEFNYQWINNAKKALKDTGSLLISGTYHNIFSLGCVLQKLDFKILNLITWQKTNPPPNFSCRYLTHSAEQIIWARKSRKHKHVFNYEVLKKINNDKQMRDVWSFPAIAPWEKVNGKHPTQKPLALLVRLLLMASDENSLIGDPFSGSSTTGIAANLLKREFIGIEKESEFIKISMDRKIELDARYKEIRSKIKDLNHQ

SEQ ID NO: 255 - DNA, 646 bp, Helicobacter pylori
  CDS (259)...(588)
cttgacttatttttttggctatttccaagatccacgatactttgatgctatatcccctttaatcaagcaaaccttcactctaccccccccccccccgaaaataataagaataataataaaaaagaggaagaatatcagtgcaagctttctttgattttagccgctaaaaacagcgtgtttgtgcatataagaagaggggattatgtggggattggctgtcagcttggtattgactatcaaaaaaaggcgcttgagtatatggcaaagcgcgtgccaaacatggagctttttgtgttttgcgaagacttagaattcacgcaaaatcttgatcttggctacccttttatggacatgaccactagggataaagaagaagaggcgtattgggacatgctgctcatgcaatcttgtcagcatggcattatcgctaatagcacttatagctggtgggcggcctatttgatagaaaatccagaaaaaatcattattggccccaaacactggctttttgggcatgagaatatcctttgtaaggagtgggtgaaaatagaatcccattttgaggtaaaatcccaaaagtataacgcttaaagtggcttaaaaaaaggctttattggtggtttaaatctttgattttagatcggat

SEQ ID NO: 256 - protein, 110 aa, Helicobacter pylori
MAKRVPNMELFVFCEDLEFTQNLDLGYPFMDMTTRDKEEEAYWDMLLMQSCQHGIIANSTYSWWAAYLIENPEKIIIGPKHWLFGHENILCKEWVKIESHFEVKSQKYNA

SEQ ID NO: 257 - DNA, 1027 bp, Helicobacter pylori
  CDS (51)...(974)
ggcgcatgaatgcattaaatgtaaagaacgcgtgtttttagaggaagataatggctaaagaaaatccgcctatcgtttttgggcctgttttatccaggcgttttgggaagtctttgggcgtggatctatcgccctctaaaaaacaatgcaattacaattgcatttattgcgagttgggtaaagccaagcccattgaacgcatggaagaagtgatcaaagtggaaaccttgattaacgccattcaaaacgccctaaacaacctcaccacccccattgatgttttaaccattaccgctaatggcgaacccacgctataccctcatttattagagcttatccaaagcatcaagccttttttaaagggcgttaaaactttgattttaagcaatggctcgctcttttatgagccaaaagtccagcaagccttaaaggaatttgacatcgttaaattttctttagacgctattgatttgaaagcctttgaaagagtggataaaccctattctaaagacattaataagattttagaggggattttgcgcttttctcaaatttatcaagggcaattggtggctgaagtgttgttaattaagggcgtgaatgatagcgcgaacaacttaaaactcatcgctgcctttttaaaacaaatcaatatagccagagtggatttaagcaccatagacagaccctcaagctttaaagcccctaaattaagcgaagatgaattgttaaaatgctctttattttttgaagggctttgcgtgagtttgcctaaacgatccattactcaagctaaaaaattgatttcttgcggtatagacgaattgctcgctttaatttccaggcgccctttaagcgcagaagaagcccccctaattctagattctaacgcttttaagcatttagaaactttgttaaaccataagcaaattacgattaaaaaagtcggctctttggagttttattgcgcgttttaacctccatttgtaagttttaccttactttagggatagcttaagcttttaaa

SEQ ID NO: 258 - protein, 308 aa, Helicobacter pylori
MAKENPPIVFGPVLSRRFGKSLGVDLSPSKKQCNYNCIYCELGKAKPIERMEEVIKVETLINAIQNALNNLTTPIDVLTITANGEPTLYPHLLELIQSIKPFLKGVKTLILSNGSLFYEPKVQQALKEFDIVKFSLDAIDLKAFERVDKPYSKDINKILEGILRFSQIYQGQLVAEVLLIKGVNDSANNLKLIAAFLKQINIARVDLSTIDRPSSFKAPKLSEDELLKCSLFFEGLCVSLPKRSITQAKKLISCGIDELLALISRRPLSAEEAPLILDSNAFKHLETLLNHKQITIKKVGSLEFYCAF

SEQ ID NO: 259 - DNA, 1350 bp, Helicobacter pylori
  CDS (87)...(1280)
atcaatctaacttgagtggatttttcgtattagtttccatgatataattttgaaaagtaagattgttttttaaaaaaaggttggtaatggaatcagtaaaaacaggaaaaacaaataaggttggcaagaatacagagatggctaatacaaaggcaaataaagagactcattttaaacaagtgagcgccattacaaatataatcagatcagttggtgggttttttacaaaaattgcaaagagagttagaggacttgtaaaaaaacaccccaagaaaagcagtgcggcattagtagtattgacccatattgcgtgcaagaaagcgaaagaattagacgataaagtccaagataaatccaaacaagctgaaaaagaaaatcaaatcaattggtggaaatattcaggattaacaatagcggcaagtttattattagccgcttgtagcgctggtgatactgataaacagatagaactagaacaagaaaaaaaggaagctgaaaacgctagggatagagcgaacaagagtgggatagaactagaacaagaaagacagaaaacaaacaagagtgggatagaactcgctaatagtcaaataaaagcagaacaagaaagacaaaagacagaacaagaaaaacaaaaagcaaataagagtgcgatagagttagaacagcaaaaacaaaagaccattaatacacaaagagatttgattaaagaacagaaagatttcattaaagaaacagaacaaaattgccaagaaaatcataatcaattctttattaaaaaattaggaattaagggtggcattgctatagaagtagaagctgaatgcaaaacccctaaacctgcaaaaaccaatcaaacccctatccagccaaaacacctcccaaactctaaacaacctcattctcaaagaggatcaaaagcgcaagagtttatcgcttatttgcaaaaagagctagaatttctgccctattcgcaaaaagctatcgctaaacaagtgaatttctataaaccaagttctatcgcttatttagaactagatcctagagattttaaggttacagaagaatggcaaaaagaaaatctaaaaatacgctctaaagctcaagctaaaatgcttgaaatgagggatttaaaaccagacccacaagcccaccttccaacctctcaaagccttttgttcgttcaaaaaatatttgctgatgttaataaagaaatagaagcagttgctaatactgaaaagaaagcagaaaaagcgggttatggttatagtaaaaggatgtaggcataagaaaataagaacaccataaaatcgtttttagcttctaggagacatcagtcagtttcttgcc

SEQ ID NO: 260 - protein, 398 aa, Helicobacter pylori
MESVKTGKTNKVGKNTEMANTKANKETHFKQVSAITNIIRSVGGFFTKIAKRVRGLVKKHPKKSSAALVVLTHIACKKAKELDDKVQDKSKQAEKENQINWWKYSGLTIAASLLLAACSAGDTDKQIELEQEKKEAENARDRANKSGIELEQERQKTNKSGIELANSQIKAEQERQKTEQEKQKANKSAIELEQQKQKTINTQRDLIKEQKDFIKETEQNCQENHNQFFIKKLGIKGGIAIEVEAECKTPKPAKTNQTPIQPKHLPNSKQPHSQRGSKAQEFIAYLQKELEFLPYSQKAIAKQVNFYKPSSIAYLELDPRDFKVTEEWQKENLKIRSKAQAKMLEMRDLKPDPQAHLPTSQSLLFVQKIFADVNKEIEAVANTEKKAEKAGYGYSKRM

SEQ ID NO: 261 - DNA, 1939 bp, Helicobacter pylori
  CDS (51)...(1886)
aagattgctaaattttaaggtttgaagaaaggaaacataagttttaaagaatgagtgcggaactgattgctgtttataaagacgagcaaataatagatttagagagcgcgaaagtcttagggctgagcgatgggattaaagcgttaaacgggacagagccgatatattttgatgattcgcctttggctttagaggtgattaggcattcatgcgcgcatttgcttgcgcaaagcttgaaagccctttatccggacgcgaaattttttgtaggccctgtggtagaagaggggttttattacgatttcaagacttcttcaaaaatcagcgaagaggatttgcctaaaattgaagcgaaaatgaaagagtttgcgaagttgaaactcgctatcactaaagagactttaaccagagagcaagctttggagcgttttaagggcgatgaattaaagcatgcggtgatgagtaaaatcggtggcgatgcctttggcgtgtatcaacaaggcgagtttgaagatttgtgtaaggggccgcatctcccaaacacccgttttttaaaccattttaagctcactaaactggctggggcttatttgggcggcgatgaaaacaatgaaatgctcattagaatctatggaatcgcttttgccaccaaagagggtttaaaagactatcttttccaaatagaagaagcgaaaaaacgagatcacagaaagctaggcgtggagctagggctttttagctttgatgatgagataggggcgggcttacctttatggctgcctaaaggggcaaggcttaggaagcgcattgaagatttattgagtcaagcgttacttttaagaggctatgagccggttaaaggtcctgagattttaaagagcgatgtgtggaaaatcagcgggcattatgacaactataaagaaaacatgtatttcaccacgattgatgagcaagaatatggcataaagcctatgaactgcgtggggcatattaaagtctatcaaagcgctttgcacagctacagagatttgcccttaaggttttatgaatacggcgtggtgcatcggcatgaaaaaagcggcgtgttgcatgggcttttaagggttagggaatttacccaagatgatgcacatattttttgctcttttgaacagatccaaagcgaagtgagcgcgattttagattttacgcacaaaatcatgcaagcgtttgattttagctatgaaatggaattatccacaaggccggctaaatccataggcgatgataaagtttgggaaaaggccactaacgctttaaaagaagccttaaaagaacaccgcattgattacaagattgatgaagggggaggggctttctatgggcctaagattgacattaaaatcactgacgctttaaagcgtaaatggcagtgtggcacgattcaagtggatatgaatttgcctgaacgcttcaagctcgctttcactaatgagtataatcacgctgagcagccggtgatgatccacagagcgattttaggctcgtttgaaaggtttattgcgattttgagcgaacattttggggggaatttccctttctttgtcgcgcccactcaaatcgctctcatccctattaatgaagagcatcatgtttttgctttgaaattaaaagaggcgctaaaaaagcgcgatatttttgtagaagtgttagataaaaacgacagcttgaataaaaaggtgcgattagccgaaaagcaaaaaatccctatgattttagtgttagggaatgaagaagtggagaccgaaattttatccattagagacagagaaaaacaagatcaatataaaatgcccttaaaggagtttttaaacatggttgaatctaagatgcaagaggttagtttttgagtagaaacgaagtgttgttaaacggagacattaattttaaagaagtgcgt

SEQ ID NO: 262 - protein, 612 aa, Helicobacter pylori
MSAELIAVYKDEQIIDLESAKVLGLSDGIKALNGTEPIYFDDSPLALEVIRHSCAHLLAQSLKALYPDAKFFVGPVVEEGFYYDFKTSSKISEEDLPKIEAKMKEFAKLKLAITKETLTREQALERFKGDELKHAVMSKIGGDAFGVYQQGEFEDLCKGPHLPNTRFLNHFKLTKLAGAYLGGDENNEMLIRIYGIAFATKEGLKDYLFQIEEAKKRDHRKLGVELGLFSFDDEIGAGLPLWLPKGARLRKRIEDLLSQALLLRGYEPVKGPEILKSDVWKISGHYDNYKENMYFTTIDEQEYGIKPMNCVGHIKVYQSALHSYRDLPLRFYEYGVVHRHEKSGVLHGLLRVREFTQDDAHIFCSFEQIQSEVSAILDFTHKIMQAFDFSYEMELSTRPAKSIGDDKVWEKATNALKEALKEHRIDYKIDEGGGAFYGPKIDIKITDALKRKWQCGTIQVDMNLPERFKLAFTNEYNHAEQPVMIHRAILGSFERFIAILSEHFGGNFPFFVAPTQIALIPINEEHHVFALKLKEALKKRDIFVEVLDKNDSLNKKVRLAEKQKIPMILVLGNEEVETEILSIRDREKQDQYKMPLKEFLNMVESKMQEVSF

SEQ ID NO: 263 - DNA, 1198 bp, Helicobacter pylori
  CDS (51)...(1145)
gcgattgtgcggagtcgttttctcaatttagcgccaatcggattagagacatgtttaaagtaatgatgcaaatggcgatcgttctcacttttgctggctctataccgatcgtgaaagtggggcgcattgccgggcaatttgccaagcctcgctccaatgcgactgaaatgctggataatgaagaagtgttgagttacagaggggatattatcaatgggatttccaaaaaagaaagagagccaaatcctgaaagaatgcttaaggcctaccatcaaagcgtagcgactttaaaccttatcagagcctttgctcaaggcgggttagcggatttggagcaagtgcatcgtttcaatttggattttgtcaaaaacaacgactttgggcaaaaataccagcaaatcgctgaccggatcacgcaagctttagggtttatgcgagcatgcggggtggagatagagcgaacgcctattcttagggaagtggaattttacaccagccacgaagcgttactgctccattatgaagagccgttggtgcgtaaggatagtctgactaaccagttttatgattgctccgcgcacatgctatggattggcgaaaggacaagagaccctaagggtgcgcatgtggagtttttaaggggggtttgtaaccctattggcgtgaaaatcgggcctaatgcgagcgtgagcgaagtgttagaattgtgcgatgttttaaacccgcgcaacattaaggggcgtttgaatttgatcgtgcgcatgggttctaagatgattaaagagcgtttgcctaaacttttacaaggggtgttggaagaaaaacgccatattttatggagcattgatcccatgcatggcaacacggttaaaaccagcttgggggttaaaacaagggcttttgatagcgtgttagatgaagtgaaaagcttttttgaaatccatagggctgaagggagtttggcttcaggggttcatttggaaatgacaggtgagaatgttacagaatgtatcggtggctcgcaagcgatcaccgaagagggtttgagctgccattactacacgcaatgcgatccaagattaaacgccacccaagccctagaactcgccttcttaatcgctgacatgctcaaaaaacagcacgcttagttaaaaagagattaatctttttttaactcttttactttataattatcgtt

SEQ ID NO: 264 - protein, 365 aa, Helicobacter pylori
MFKVMMQMAIVLTFAGSIPIVKVGRIAGQFAKPRSNATEMLDNEEVLSYRGDIINGISKKEREPNPERMLKAYHQSVATLNLIRAFAQGGLADLEQVHRFNLDFVKNNDFGQKYQQIADRITQALGFMRACGVEIERTPILREVEFYTSHEALLLHYEEPLVRKDSLTNQFYDCSAHMLWIGERTRDPKGAHVEFLRGVCNPIGVKIGPNASVSEVLELCDVLNPRNIKGRLNLIVRMGSKMIKERLPKLLQGVLEEKRHILWSIDPMHGNTVKTSLGVKTRAFDSVLDEVKSFFEIHRAEGSLASGVHLEMTGENVTECIGGSQAITEEGLSCHYYTQCDPRLNATQALELAFLIADMLKKQHA

SEQ ID NO: 265 - DNA, 388 bp, Helicobacter pylori
  CDS (51)...(335)
tgatagcgactttttgaggcccatgcaccccaaaaacggtttttaattcaatgtcagctgtccggctaggcccgccaataaggagcatgtttgtgggtaatgcaccgttttggctttggttttttaaagcttgcatgccttcactcaaattgcgcacaatggattcttttttcaataagatgatgcaattaagggtgatgagcgaaagcaatcgcgggcttgcatgcgaagagaccgccccaatcatgcccaagcttgaaatcccacaaaccccatgcaataaagccgtatcaatctcaaacaactcttcacgcatcgcttcaatttctttatcataaggctgtaaagtaaaatccttaaacgcttcaaaattcaaattcaaatctgt

SEQ ID NO: 266 - protein, 95 aa, Helicobacter pylori
MSAVRLGPPIRSMFVGNAPFWLWFFKACMPSLKLRTMDSFFNKMMQLRVMSESNRGLACEETAPIMPKLEIPQTPCNKAVSISNNSSRIASISLS

SEQ ID NO: 267 - DNA, 1756 bp, Helicobacter pylori
  CDS (51)...(1703)
ttttaaagagaactagcactaagagaatatttttaaaaagggattttttagtgctagaatttcatcaaatttatgatcctttgggtaatatttggctgagcgctcttgtggccttattgccgattttattgtttttcttatctttaatggtttttaaactcaaaggttatacagcggcctttttgagcgtggccttatcagccgttattgcggttttagtgtataaaatgcctgttagcatggtgggttcaagcttcctttacggctttctttatggcttatggccgatcgcttggatcattattgcggcgatttttttatacaaactcagcgttaaatccggctattttgaaattttaaaagaaagcgtccagtccatcactttagatcaccgcattttagtgattttgattggcttttgttttggctcgtttttagaaggggcgatcggctttggagggcctattgccattaccgcagcgattttagtgggcttagggttaagccctttgtattctgccgggttatgtttgatcgctaataccgctcctgtagcttttggcgcggtgggtatccctataagtgctatggcgagcgcggtaggggtgccagcgattttaatttcagccatgacgggtaaaatcctcttttttgtgagcttgttagtgccgtttttcattgtgtttttaatggatggctttaaagggattaaagaaacttttccggccgtttttatcgcggctttttctttcgctggtgcgcaatttttaagctctaattatttagggccagaattgcctggtattatttcagcccttgtttcactcgttgcaacagcgctctttttgaaattttggcagcctaaagcgatttttagaagcgacggcaaagcggcttcgttcactaagagtaaccatcatatttgtaagatctatgtcgcttggtctccttttgtgattttagttttagtgattgtgctatggatacagcctttttttaaagccttgtttgaaaaagacggcttgttagctttttctaatttttattttgaattcaataacatcagtaaccacatctttaaaagcccgccttttgtagaagccaatcaaagcgtgagttttccggtggtgtttaaatttctcttaatcaacacggttggcacttccatttttttagccgctcttgttagcatgctcgttttaagggtgcgagtgagcgatgcgctgagcgtctttggcgagactttaaaagaaatgcgttaccccattctcaccattggtttagtcttaagctttgcctatgtgtctaattacagcgggatttcttccactctagccttagcgctcacgcatacgggtttggctttcacctttttctcgcccttgatcgggtgggtaggcgtgtttttaaccgggagcgatacgagttccaatcttttgtttggctctttacagcaactcaccgcccaacgattgcacctccctgaggttttaaccctaacggctaataccgtgggtggcactttaggcaagatgataagccctcaaagcatcgctatcgcttgcgcggcggtggggttagccgggaaagagagcgatttgttcaaattcacggttaaatactcccttatttttgtagcgatcatgggagttgtgatcagcgcgattgcgtatttgatccctgaagtggtgcctgcgataaagtagggccattttagatttagcagggtttaacccccaaataaatttttttgttt

SEQ ID NO: 268 - protein, 551 aa, Helicobacter pylori
VLEFHQIYDPLGNIWLSALVALLPILLFFLSLMVFKLKGYTAAFLSVALSAVIAVLVYKMPVSMVGSSFLYGFLYGLWPIAWIIIAAIFLYKLSVKSGYFEILKESVQSITLDHRILVILIGFCFGSFLEGAIGFGGPIAITAAILVGLGLSPLYSAGLCLIANTAPVAFGAVGIPISAMASAVGVPAILISAMTGKILFFVSLLVPFFIVFLMDGFKGIKETFPAVFIAAFSFAGAQFLSSNYLGPELPGIISALVSLVATALFLKFWQPKAIFRSDGKAASFTKSNHHICKIYVAWSPFVILVLVIVLWIQPFFKALFEKDGLLAFSNFYFEFNNISNHIFKSPPFVEANQSVSFPVVFKFLLINTVGTSIFLAALVSMLVLRVRVSDALSVFGETLKEMRYPILTIGLVLSFAYVSNYSGISSTLALALTHTGLAFTFFSPLIGWVGVFLTGSDTSSNLLFGSLQQLTAQRLHLPEVLTLTANTVGGTLGKMISPQSIAIACAAVGLAGKESDLFKFTVKYSLIFVAIMGVVISAIAYLIPEVVPAIK

SEQ ID NO: 269 - DNA, 961 bp, Helicobacter pylori
  CDS (51)...(908)
tgaaccacgccataaaaaagttcatgataatggcataaaggaaagttgaaatggattttttaaacgaccatataaatgtttttggcttgattgcagcgcttgtgattttagttttaaccatctatgaatccagttcgctcattaaagaaatgcgcgacagcaaatctcaaggtgagcttgtagaaaatgggcatttgattgatgggataggggagtttgccaataatgtgccagtaggctggatcgcaagctttatgtgcacgattgtgtgggctttttggtatttcttctttgggtatccgctgaatagcttttctcaaatcgggcaatacaatgaagaggttaaagcgcacaaccaaaaatttgaggccaagtggaagcatttgggtcaaaaggaactggtggatatgggtcaaggcatctttttagtccattgttcgcaatgccatggcatcaccgctgagggcttgcatgggagcgctcaaaatctggtgcgctggggtaaagaagagggtattatggataccattaagcatggctctaagggcatggattatctcgctggggaaatgcccgctatggaattggacgaaaaagacgctaaagcgatcgcaagctatgtgatggcagaactttctagcgttaaaaaaaccaaaaaccctcaactcattgataaaggcaaggaattgtttgaaagcatgggttgcacaggctgtcatggcaatgatggtaagggcttgcaagaaaatcaagtgtttgcagccgatttgaccgcttacggcacagagaattttttgagaaatatcttaacgcatggcaaaaagggcaatatagggcatatgccatcattcaagtataaaaactttagcgatttgcaagttaaagcgttactgaatttatccaatcgctaaaacccttagaagattaaaggaaaagagatgaaatttttaaacggattagc

SEQ ID NO: 270 - protein, 286 aa, Helicobacter pylori
MDFLNDHINVFGLIAALVILVLTIYESSSLIKEMRDSKSQGELVENGHLIDGIGEFANNVPVGWIASFMCTIVWAFWYFFFGYPLNSFSQIGQYNEEVKAHNQKFEAKWKHLGQKELVDMGQGIFLVHCSQCHGITAEGLHGSAQNLVRWGKEEGIMDTIKHGSKGMDYLAGEMPAMELDEKDAKAIASYVMAELSSVKKTKNPQLIDKGKELFESMGCTGCHGNDGKGLQENQVFAADLTAYGTENFLRNILTHGKKGNIGHMPSFKYKNFSDLQVKALLNLSNR

SEQ ID NO: 271 - DNA, 307 bp, Helicobacter pylori
  CDS (51)...(254)
tactgaatttatccaatcgctaaaacccttagaagattaaaggaaaagagatgaaatttttaaacggattagcagggaatttactgattgtggttattttattgtgtgtggccgttttttttacgctcaaagcgatccatatccaaaaagagcaagccaccaattattaccgctataaggatattaacgctttagagacaaaaaacacccaaaaccgggctaactatgaattagtcaatcaagggagtaaaaaatgaaattcacgactttagaaaaaattttagctttgatggtagtagcgaccatt

SEQ ID NO: 272 - protein, 68 aa, Helicobacter pylori
MKFLNGLAGNLLIVVILLCVAVFFTLKAIHIQKEQATNYYRYKDINALETKNTQNRANYELVNQGSKK

SEQ ID NO: 273 - DNA, 843 bp, Helicobacter pylori
  CDS (51)...(770)
ttattagctatcatgctaaagaagtggctaacttattacaaaggaattgaatgggacgagcgtttgaatacagaagagcggctaaagaaaaacgatgggataagatgagtaaggttttcccaaagctcgctaaagcgatcactctagcggcaaaagatggcgggagcgaaccggacacgaacgccaaactacgaacagcgattttaaacgctaaagcgcaaaacatgcctaaagacaatattgacgcagcgattaaaagagcgagcagtaaagaagggaatttgagtgaaatcacttatgaaggtaaggcgaattttggcgtgctaatcatcatggaatgcatgactgataaccccaccagaaccattgccaaccttaaaagctatttcaataaaacgcaaggggcaagcatcgtgcctaatggctctttagagtttatgtttaaccgaaaaagcgtgtttgaatgcttgaaaaatgaagtggaaaatttaaaactcagtctagaagatttagaattcgctctcattgattatggtttggaagaattagaagaagtggaagacaagatcattattaggggggattataacagcttcaagcttttaaatgaggggtttgaaagcttgaaattacccattttaaaagcgagtttgcaacgcatcgccacaacgcccattgaattgaatgacgaacaaatggagcttaccgaaaaattactggacaggattgaagacgatgatgatgtggtcgcgctttataccaatattgagtgaaatgcaaaaagactcaaagtatttttttaaaccacccaagcattcatcccaatagggaatgcgttggaga

SEQ ID NO: 274 - protein, 240 aa, Helicobacter pylori
MGRAFEYRRAAKEKRWDKMSKVFPKLAKAITLAAKDGGSEPDTNAKLRTAILNAKAQNMPKDNIDAAIKRASSKEGNLSEITYEGKANFGVLIIMECMTDNPTRTIANLKSYFNKTQGASIVPNGSLEFMFNRKSVFECLKNEVENLKLSLEDLEFALIDYGLEELEEVEDKIIIRGDYNSFKLLNEGFESLKLPILKASLQRIATTPIELNDEQMELTEKLLDRIEDDDDVVALYTNIE

SEQ ID NO: 275 - DNA, 451 bp, Helicobacter pylori
  CDS (108)...(392)
atcagagggattacgcctggaaggataagaattttagggatctgtaagaagatctagaagaagcgatagaatacaacaaaaagggtcaggggcattttataggcaccatggttgtcgctaagaatgaagacaacaaaaaattgtatgacatcattgacggccagcaacgaacgactaccatcttcatgctcttgcatgtcttggcgaacaaacaaaacgagaaagacaagcaagaaacaagaaaatatctataccaaaagggggaattaaaattagaagtcgcccccaaaaaccaaagcttcttcaaaacgctcttggaagcggcagaaaaggagaatatcagccagaaaaagatgcagacaccgagggcaagcaaaatctttttgaagttttgaaggctatcttggataaggtcagcaaattgagtgaagaagaagtgaatgagcgtttg

SEQ ID NO: 276 - protein, 95 aa, Helicobacter pylori
MVVAKNEDNKKLYDIIDGQQRTTTIFMLLHVLANKQNEKDKQETRKYLYQKGELKLEVAPKNQSFFKTLLEAAEKENISQKKMQTPRASKIFLKF

SEQ ID NO: 277 - DNA, 840 bp, Helicobacter pylori
  CDS (54)...(718)
caatgtccatgagttattggaccaacacaacgctaacctaaaaggagaacaccatgagtgataatgaacgaacgattgtagttagagtgctaaaatttgaccctcaaagcgcggtgagtaagccgcattttaaagagtatcagttgaaagaaacgccatccatgacgctttttatcgctttgaacctcattagagagcatcaagatccggatttgagttttgattttgtgtgccgcgctgggatttgcggctcttgcgcgatgatggttaatgggagaccgaggctagcttgtaaaaccctaacttctagctttgaaagcggggtgatcacgctcatgcccatgcccagttttacgctcattaaagatttgagcgtgaatacgggcgattggtttttggatatgactaaaagggtggagagttgggcgcattctaaagaagaagtggatattactagaccggaaaaaagggttgagcctgacgaagcccaagaagtctttgaactagacaggtgtattgaatgcgggtgttgtatcgcttcttgcgggactaaactcatgcgccctaatttcattggagctgctggcatgaacagagccatgcgttttatgattgacagccacgatgaaagaaacgatgatgatttttatgagttagtcggcgatgatgatggtgtttttgggtgcatgagccttatcgcttgccatgacacttgccctaaagaattacccttgcaaagcagtatcgccactttgcgtaacaggatgttgaaagtgggtaaaagccgctaatttctttttagtgggtcgtttttgaaaatctttttagtctttttaagcg

SEQ ID NO: 278 - protein, 222 aa, Helicobacter pylori
MSDNERTIVVRVLKFDPQSAVSKPHFKEYQLKETPSMTLFIALNLIREHQDPDLSFDFVCRAGICGSCAMMVNGRPRLACKTLTSSFESGVITLMPMPSFTLIKDLSVNTGDWFLDMTKRVESWAHSKEEVDITRPEKRVEPDEAQEVFELDRCIECGCCIASCGTKLMRPNFIGAAGMNRAMRFMIDSHDERNDDDFYELVGDDDGVFGCMSLIACHDTCP

SEQ ID NO: 279 - DNA, 351 bp, Helicobacter pylori
  CDS (53)...(262)
gaaagccaaagtagccccttgattgaaacaagattgagcgatcccataagcgatggatttattgttcgccacccctacaataagcccttttttaccttttaaaaatcccatgattttcctttataaaaatgaaatgattgttttaaaattttctaattcccaagacgcgctcccgatcaacaagccatccacgctatcaatccctaaaatttctttagcgttttgtgtgttcacgctccccccatacaacaagggcgttttttgatttaagatttgctttaaaaaaccatgcgtgagataaatatcttctaaagaagcgctttttttggtgccaatcgcccaaataggctc

SEQ ID NO: 280 - protein, 70 aa, Helicobacter pylori
MDLLFATPTISPFLPFKNPMIFLYKNEMIVLKFSNSQDALPINKPSTLSIPKISLAFCVFTLPPYNKGVF

SEQ ID NO: 281 - DNA, 1271 bp, Helicobacter pylori
  CDS (368)...(1210)
tttaaggactatgcatgcaagagattatccctattgtcgtggcttttgataacaactattgtatccctgctggcgtgagcttattttccatgctagcaaacgccaaacgagagagagagagagagagagagtaaaactcttttatcaaatccattgtttggtggagagtttaaccccagagaatatagccaaattagaagaaacgatcgctccttttagagctttttctagcatagagtttttggatattaccgataaagaattagaaccacgccacaattataataagcttgatcctttaatagcgagtgaaattaaaaaattgtatttaaaactcaatgctttttcgcaaaaacgcttttctaaaatgatcatgtgccgtttcttttttgcctcccttttcccccaatacgataagatgatcatgtttgatgtggacactttgtttgtgaatgatattagcgagagcttttttatcccccttgaaacgcattattttggggctgtgagggaaaaagatttgatcgctataaataggaattcggctaaggatttatacgaattgcgccaaatgcatgcaaaatctatcggcatcgccaacgctttccctaatttagaagaagctcaaatcctttttgacaactactttaacgccgggtttttagccttaaatttaaaatcatggcgtaaagaaaatcttgaaaaccaattgattacctttttcattttgaaaaatgaaaaacttttatttaacgatcaagatgctttgtgttttgtgtgccgtgggaggattttagaattgccttatccatacaatgcccaccctagtttccttgatacgctctcattccctagcatcaaagaagcgcgcatgctgcatttttggggcgataaaccctggaaactcttaagcgtcattggcgcgaaaaaatggcatgaagcgttgatccaaacgccttttaaagacgcctatttcaacgcttcttttttagatcacctctttgaatcccttcaaaacaaggataatgagatcaaaagaagagatgaaaggatcattgaagcacttcaagcaagggataaaatcctgtctttttcagacaagcgacattcttttgaatctcttctgcccaagctttcttctaaactccttatagaatttttgctttttaaagccaaacaaaaagtgaagcgactgattaaaagggttttttaaaaccctttttaaactaatgcgagcaagcatgggtttgtgtgggctggatgtccttatt

SEQ ID NO: 282 - protein, 281 aa, Helicobacter pylori
MIMCRFFFASLFPQYDKMIMFDVDTLFVNDISESFFIPLETHYFGAVREKDLIAINRNSAKDLYELRQMHAKSIGIANAFPNLEEAQILFDNYFNAGFLALNLKSWRKENLENQLITFFILKNEKLLFNDQDALCFVCRGRILELPYPYNAHPSFLDTLSFPSIKEARMLHFWGDKPWKLLSVIGAKKWHEALIQTPFKDAYFNASFLDHLFESLQNKDNEIKRRDERIIEALQARDKILSFSDKRHSFESLLPKLSSKLLIEFLLFKAKQKVKRLIKRVF

SEQ ID NO: 283 - DNA, 1198 bp, Helicobacter pylori
  CDS (51)...(1145)
atttagacaataacgctacaactaggattgaccctaaagtcaaagagatcatggatccttttttaagggatcattatgggaatcctagctcgttgcaccagtttggcacagaaacccacccagccattgcagaagcgctagataagctttataagggcattaacgctagggatatagatgatgtgatcatcacttcttgtgcgacagaaagcaataattgggttttaaagggcgtgtattttgatgaatgcttgaaaaaaggcaaaaaccatattgtaaccacggttgcagagcatccggcggtgcgatccacttgcaattttttagaaagcttgggggtggaggttacttacttgcccattaatgagcatgggagcatcaccgcagagcaagtcaaagaagcgatcacagaaaaaaccgctctagtgagcgtgatgtgggcgaataatgaaaccggtctcattttccctattgaagaaattggggctatttgtaaagaaaagggcgtgttgttccataccgatgccgtgcaagcgattggtaaaatccctgtagatgtgttaaaagcgaatgcagatttcctttcttttagcgcgcacaagtttcatgggcctaaaggcattggggggttgtatattagaagtggggtgggattgacccctctttttcatggcggggagcatatgaatggcaggcgcagcgggactttgaatgtgccttatattgtgggaatgggcgaagcgatgaaattagccgtagagcatttagactatgaaaaagaagtggtggggaaattgcgcgacaaattagaagaagcgcttttgaaaatccctgatgtgatggtggtgggcgatagaatccatcgtgtgcctaacacgactttagtcagcgtgagagggattgaaggagaggccatgctgtgggatttaaaccgctctaatatcgccgcttccacagggagcgcgtgcgcgagtgaggatttagaggctaatccggtgatggtagcgattggagcgagtaaggaattggctcataccgctatcaggctttcattgagccgttttaacacggaagctgaaattgacaaaacgattgaagttttctctcaagcggctgtaaggttgagaaatatttcaagctcttattaaaaagaatataaaggaatcaaaatggcaaaacatgatttagtgggttcggt

SEQ ID NO: 284 - protein, 365 aa, Helicobacter pylori
MDPFLRDHYGNPSSLHQFGTETHPAIAEALDKLYKGINARDIDDVIITSCATESNNWVLKGVYFDECLKKGKNHIVTTVAEHPAVRSTCNFLESLGVEVTYLPINEHGSITAEQVKEAITEKTALVSVMWANNETGLIFPIEEIGAICKEKGVLFHTDAVQAIGKIPVDVLKANADFLSFSAHKFHGPKGIGGLYIRSGVGLTPLFHGGEHMNGRRSGTLNVPYIVGMGEAMKLAVEHLDYEKEVVGKLRDKLEEALLKIPDVMVVGDRIHRVPNTTLVSVRGIEGEAMLWDLNRSNIAASTGSACASEDLEANPVMVAIGASKELAHTAIRLSLSRFNTEAEIDKTIEVFSQAAVRLRNISSSY

SEQ ID NO: 285 - DNA, 1273 bp, Helicobacter pylori
  CDS (51)...(1220)
tccggtttgaagttggtttttaaatctttggctataatcaagccattctaatgagaaagaaaggcatgtttgaaaagatacaaaaagaatggctgagcaacattcaaaaggatttgttgtctggttttgtggtggggctttctgtgatcccagagacggccggctttgcgatcatggtgggtttagatgtgggcgtggcgttttatacgaccttttacatggcttttgttttgtctctttttggggctagaaaggcgatgattagcgcagcggccggctcagtggcgctcattttagtgggcgtggttaaaaactatgggcttgaatacgcgggcgtggcgactcttatggcaggggtgttgcaaattcttttaggctatttgaaaatagggaatcttttgaggtttatcccccaatcagtgatgtatggctttgtgaacgcgctaggcattttgcttttaatggagcaattcaaattccttcaaaaccaaaatttgggggtgtttgtcttgctcgctattgggatactcatcatttatctttttcctctaatcactaaaaaaatcccctctaatctgatttgtatccttatagtgagcgcgatcgctttaatttttgatatgcatgcgccgaatttggggagcattgagcaaggggtttcaggctttcatttcatcattatccccaaaaatttggattttaaaataatgatagagttgttgccttacgctctttctttagcactagtgggaacgatagaaagcttattgacggctaaaactttagatgtgattttaaaagacggcgtgagcgataaaaataaagaaactaaagcgcaaggcttggggaatatcatctcagggcttttggggggaatgacagggtgcgctttagtggggcagtctatcattaacgcaaaatccggggctaaaacaaggctttctactttttttgccggcttttctttaatggtgctcatattagtgtttaatgaatatgtggttaagatccccattgtggcggttgtggcggtaatggtgatgatttctttcaccacttttaatttccaatccattattaacattaaaaaaatcaagctctatgacacgctcaacatgctcttagtcgtggcggtggttttatacacgcataatttagcgataggggttgtggtgggggttttagtcaatgcgttatggatcaaatctaaagggattgcatgaaattttattttaaaaagttgggtagctagagatatggctccagatgtagg

SEQ ID NO: 286 - protein, 390 aa, Helicobacter pylori
MRKKGMFEKIQKEWLSNIQKDLLSGFVVGLSVIPETAGFAIMVGLDVGVAFYTTFYMAFVLSLFGARKAMISAAAGSVALILVGVVKNYGLEYAGVATLMAGVLQILLGYLKIGNLLRFIPQSVMYGFVNALGILLLMEQFKFLQNQNLGVFVLLAIGILIIYLFPLITKKIPSNLICILIVSAIALIFDMHAPNLGSIEQGVSGFHFIIIPKNLDFKIMIELLPYALSLALVGTIESLLTAKTLDVILKDGVSDKNKETKAQGLGNIISGLLGGMTGCALVGQSIINAKSGAKTRLSTFFAGFSLMVLILVFNEYVVKIPIVAVVAVMVMISFTTFNFQSIINIKKIKLYDTLNMLLVVAVVLYTHNLAIGVVVGVLVNALWIKSKGIA

SEQ ID NO: 287 - DNA, 1020 bp, Helicobacter pylori
  CDS (386)...(964)
gaagaaaaaattttagaaatgttagaaagcgaataagggggagtgagtgggaaatttagtgattggctctagggggagcgaattagccttatggcaagcgaatcacattaaagaacgcctgaaaaaagaatgcttgatagaaagcgaaattcaaatcgttaagactaagggcgataaaatcttagacacccctttaaataagatcggcggtaaggggctattcactaaggaattagaagaattgcttttaaagggcgcaattgatttggcggtgcattctttaaaagacgtgccggtcgtgtttgaaaaggggttagacttggcatgcatcaccaaaagggctgatgtgagggacacttttttaagcgtgaaattccctgatttgatgagtttgcctaaaggggcaaaggttggcacgacttctttaaggcgctctatgcagatcaaattaaagcgccaggatttggacacagaaagcttgagagggaatgtccaaacccgtttgaaaaagcttgaatgcggagaatttgacgctatcattttagctgaagccgggttgtgccgcctagaaattcaaggagcgaaataccgcaaggcttttagcgtagaagaaatgattcctagcatgggtcagggggctttaggggtagaaatgctcaaaaaccacaagcattttgccacgcttcaaaaactcaacgacgagaaaagcgcgttttgctgccgtttagaaagggagtttatcaaggggcttaatggagggtgtcagatccctataggcgtgcatgcgagtttaatgggcgatagggttaaaatccaggcggttttaggcttgcctaacgggaaagaagtcattactaaagaaaaacaaggggataaaactaaagcgtttgatttagttcaagagcttttagaagaatttttgcaaagcggggctaaagagattttagaaaaggcgcagttgttttaatgcgtttgtttatcgcgctagttttgttttggtggtggttaagcttgaacgct

SEQ ID NO: 288 - protein, 193 aa, Helicobacter pylori
MSLPKGAKVGTTSLRRSMQIKLKRQDLDTESLRGNVQTRLKKLECGEFDAIILAEAGLCRLEIQGAKYRKAFSVEEMIPSMGQGALGVEMLKNHKHFATLQKLNDEKSAFCCRLEREFIKGLNGGCQIPIGVHASLMGDRVKIQAVLGLPNGKEVITKEKQGDKTKAFDLVQELLEEFLQSGAKEILEKAQLF

SEQ ID NO: 289 - DNA, 265 bp, Helicobacter pylori
  CDS (51)...(212)
taagcgctttgcgtgtttaaaaattccttatccaagctctcagcgtcttcatgaaagctgtaaccatctttcatgataaattccctcgctctcaccagcccaaatcttgggcggatttcatcacggaatttcgtgtggatttgatagagatggacgggcaattgcttgtaacttttaatgaaattagcggcaatttcggtgatattttcttctaaagtggggcttaaaacaaaatcattgtcttttcggtctttaaaaaccaata

SEQ ID NO: 290 - protein, 54 aa, Helicobacter pylori
MKAVTIFHDKFPRSHQPKSWADFITEFRVDLIEMDGQLLVTFNEISGNFGDIFF

SEQ ID NO: 291 - DNA, 1350 bp, Helicobacter pylori
  CDS (73)...(1305)
ttttactttttttttggtattctaacaagcttttaaataatccaatctactttgttttaaggataatattttatggcagatgtcgttgtggggatccagtggggagatgaggggaagggaaaaattgttgataggatcgctaaagattatgactttgtggtgcgctatcagggcgggcataatgctgggcataccattgtgcataagggggttaagcattctttgcatttaatgccttcaggggttttataccccaaatgcaagaacatcatttctagcgcggtggtcgtgagcgttaaggatttgtgcgaagaaatcagcgcgtttgaggatttagaaaatcgtttgtttgtcagcgacagagcccatgtgatcttgccctatcatgccaaaaaagacgcttttaaagaaaaatctcaaaacatcggcacgactaaaaaaggcataggcccttgctatgaggataaaatggccaggagcgggataagaatgggggatttattagacgataaaatcttagaagaaaagctaaacgctcatttcaaagccattgagccttttaaaaaagcgtatgatttgggcgagaattacgaaaaagatttgatggggtattttaaaacttacgctccaaaaatttgcccctttatcaaagacacgacaagcatgctgatagaagcgaatcaaaagggtgaaaaaatcctattagaaggggcacaaggcacgcttttagacattgatttagggacttacccttttgtaacaagctctaacaccacgagcgctagcgcatgcgtgagcaccggcttaaaccctaaagcgatcaatgaagtcataggtatcacaaaagcctactccactcgtgtgggtaatgggcctttccctagcgaagacactacacccatgggcgatcatttaaggactaagggtgcggagtttggcacgacaaccaagcgcccaaggcgttgcgggtggctggatttggtggctttgaaatacgcttgcgctttgaatggttgcacgcaattagccttaatgaaattagacgttttagacgggattgatgcgattaaggtgtgcgtggcttatgaaagaaagggcgaaagattggagattttccctagcgatttgaaagattgcgtgccgatctatcaaacttttaaaggttgggaaaaaagcgtgggcgtgagaaaattagacgatttagagccaaacgttagagagtatatccgttttattgaaaaagaagtgggggtaaaaatccgccttatttctacaagccctgaaagagaagacacgatttttctatgaaaaaattcgcttctgtattggtgcaattaaaaacccttgcgt

SEQ ID NO: 292 - protein, 411 aa, Helicobacter pylori
MADVVVGIQWGDEGKGKIVDRIAKDYDFVVRYQGGHNAGHTIVHKGVKHSLHLMPSGVLYPKCKNIISSAVVVSVKDLCEEISAFEDLENRLFVSDRAHVILPYHAKKDAFKEKSQNIGTTKKGIGPCYEDKMARSGIRMGDLLDDKILEEKLNAHFKAIEPFKKAYDLGENYEKDLMGYFKTYAPKICPFIKDTTSMLIEANQKGEKILLEGAQGTLLDIDLGTYPFVTSSNTTSASACVSTGLNPKAINEVIGITKAYSTRVGNGPFPSEDTTPMGDHLRTKGAEFGTTTKRPRRCGWLDLVALKYACALNGCTQLALMKLDVLDGIDAIKVCVAYERKGERLEIFPSDLKDCVPIYQTFKGWEKSVGVRKLDDLEPNVREYIRFIEKEVGVKIRLISTSPEREDTIFL

SEQ ID NO: 293 - DNA, 1363 bp, Helicobacter pylori
  CDS (51)...(1310)
ttttagggcttttcaatgatctcactcgtttgctataaaagggggagctggtggatgtattgagcgtgagcgaaatcaatgcgcaaatcaaagcccttttagaagcgacttttttgcaagttagggttcaaggggaagtgagtaatttgactatccataaggtgagcggccatgcgtatttttcgctcaaagacagccagtcggttattaaatgcgtgctgtttaaagggaacgctaacaggctcaaattcgctttaaaagaagggcaggaagtggttgtttttgggggtattagcgtgtatgtcccaaggggggattatcaaatcaattgctttgaaatagagcctaaggatataggttcattaactttagctttagagcaattgaaagaaaaattacgccttaaaggctattttgatgaagaaaataaattacccaaaccgcattttcctaaacgagtggcagtcatcacttctcaaaattcagccgcttgggcggacatgaaaaagatcgcttccaaacgatggccgatgtgtgaattagtttgtatcaacaccttaatgcaaggggagggctgcgttcaaagcgtggtggaaagcatcgtttatgcggatagttttcatgacacaaaaaacgcttttgatgcgattgtagtggctaggggtggggggagcatggaggatttgtattctttcaatgatgaaaaaatcgctgatgctctgtatttggccaaaaccttcagcatgtcagctattgggcatgagagcgattttttattgagcgatttagtggcggatttaagggcttctacgccttcaaacgcgatggaaattttactccccagcagcgatgaatggttgcaaagacttgatgggtttaatgtgaaattgcaccgctcgtttaaaactttgctccaccaaaaaaaggcgcatttagagcatttagtggcttctttaaaacgattgagttttgaaaacaagcaccatttaaacgctttaaaactagaaaaattaaaaatcgccctagaaaataaaactctagaatttttacgctttaaaaaaacgcttttagaaaaaatctctactcaaacattaacaagcccttttttacaaactaaaacagagcgattgaacaggctagaaaacgcccttaaactcgctcatgctaatttgaaattaccccaattcggggcgttggtgagcaaaaataatcaagcgatagaattagaggcattaaaaaggggcgataaaattgaattaagtaatgaaaaaaccagagcgagcgctgaaattttgagcgtggatagggtgtaggggtttgaaaaataatatttaaaacgctatttgttttatcttaaaatttc

SEQ ID NO: 294 - protein, 420 aa, Helicobacter pylori
VDVLSVSEINAQIKALLEATFLQVRVQGEVSNLTIHKVSGHAYFSLKDSQSVIKCVLFKGNANRLKFALKEGQEVVVFGGISVYVPRGDYQINCFEIEPKDIGSLTLALEQLKEKLRLKGYFDEENKLPKPHFPKRVAVITSQNSAAWADMKKIASKRWPMCELVCINTLMQGEGCVQSVVESIVYADSFHDTKNAFDAIVVARGGGSMEDLYSFNDEKIADALYLAKTFSMSAIGHESDFLLSDLVADLRASTPSNAMEILLPSSDEWLQRLDGFNVKLHRSFKTLLHQKKAHLEHLVASLKRLSFENKHHLNALKLEKLKIALENKTLEFLRFKKTLLEKISTQTLTSPFLQTKTERLNRLENALKLAHANLKLPQFGALVSKNNQAIELEALKRGDKIELSNEKTRASAEILSVDRV

SEQ ID NO: 295 - DNA, 1083 bp, Helicobacter pylori
  CDS (51)...(1031)
aaagacgcgcatggattctgttgggtttgaagaacctcaaaggggtttgggtgcttaaggggttaaaaaaagcgtttaaggagaggttttgctctcaagtgtatatctcttttaatgtggatcacaatcttttatccactcaagtcataaggatcaaaaacgatcgcattaaagagaaattttttaaaacttttgagactaaagtggagactaaaaatggtgaagtccctattcaagccttaaaaatcgccagaacttatagccaaaaatacccctacacttattttagcgcgatgagtaaagctaaagaggttttatgcgaaaagcaggcgtttgaacaaatcaaacaagaaaatcaagattatcatgcttgtgaagtcaatcaaaagtattgcgtttatgtggaatctaaggattttttaaaggattttaagcgttttaaaatccaggatgtggattttttgttttcgccttttagccttatttatgattttgtgcgcgataatttagaaaataagccgttgttgtatttgcttttggagcgttcaagattttattttttgattgcggataaaaaagagatttttttagccaaatccgtgtttttagaagaacaacctgaagagtttatagagagcaaagaagaagattttatgggaatggataatgaggctgtggatttgtttttgagtgaaatccaagaagatattgacagccttgaagaagcgataggcctagacagcagtaaggataatagcgaaaaaataacagaggacgcttatagtttgattgaaggcatgacgaatatccccttaattgcagatgttttgcaagagggattgcgtggcgtctatcattctagagagatagactttgtagaaaaagtggttgttttagacagctgtcaaatccaccaaaaagcgttaatgcatttgcaagaaactttgatgatagaagtggataggcttgatttttctttagtggagcgcttgaacattttagcgcgcatggagaatgaaaagcatgcgttttagttacattgagccaagagcgaaataccttatcagcaagctttctaaaatt

SEQ ID NO: 296 - protein, 327 aa, Helicobacter pylori
VLKGLKKAFKERFCSQVYISFNVDHNLLSTQVIRIKNDRIKEKFFKTFETKVETKNGEVPIQALKIARTYSQKYPYTYFSAMSKAKEVLCEKQAFEQIKQENQDYHACEVNQKYCVYVESKDFLKDFKRFKIQDVDFLFSPFSLIYDFVRDNLENKPLLYLLLERSRFYFLIADKKEIFLAKSVFLEEQPEEFIESKEEDFMGMDNEAVDLFLSEIQEDIDSLEEAIGLDSSKDNSEKITEDAYSLIEGMTNIPLIADVLQEGLRGVYHSREIDFVEKVVVLDSCQIHQKALMHLQETLMIEVDRLDFSLVERLNILARMENEKHAF

SEQ ID NO: 297 - DNA, 1233 bp, Helicobacter pylori
  CDS (58)...(1170)
attccaaacttcctaaaaaatgattacgccattatatccaagattaaggcttaaacgatggattttcaactccaagcgactgacaataacgcgcgagctggtcttttaaatttagcccattctcaagtggcaacgcctgtttttatgcccgtaggcacgcaaggctgcatcaaatctttagacgctacagatgcgcaagaaattttaggcgctaaactcattttagccaacacctatcacatgtatttaaggccgggtgaaaaggtcgttgaggagttagggggcttgcatcgtttcgctcaattttatgggagttttttaaccgatagtggagggtttcaagcctttagtttgagcgataatgtcaaattgcaagaagatgggatcgtttttaaatcccatattgatgggagcaagcatctattcacgcccgctaaagttttggacattcaatattctttgaatagcgatattatgatggttttagacgatttagtgggcttgcccgctcccttaaaacgccttgaagaatccattaaaagaagtgctaaatgggcgaatatgagcctagaataccacaaagaaaaaaaccgcccgagcaacaacctttttgccattatccagggcgggacgcatttgaaaatgcgcagccttagcgtgggattaacgcatgagggttttgatggctacgctataggcggtttagcggtgggggaaagcgctgatgaaatgctagaaaccatcgcgcacaccgcccccttgctccccaaagacaagcctcgctacttaatgggcgtaggcacgcctgaaaatatcctagacgctatcagtttgggggtggatatgtttgattgcgtgatgcccaccagaaacgccagaaacgccacccttttcacgcattctggcaaaatttctatcaaaaacgcgccctataaattggataatacccctattgaagaaaattgcgcatgttatgcttgcaaacgctattctaaagcctatttgcaccatttatttagggctaaagaactcacttacgctcgtttggccagcttgcacaatttgcatttttatttagagctggtgaagaacgccagaaacgccattttagaaaagcggtttttgagttttaaaaaagaatttttggagaaatacaactcccgctctcattgaatgatggaatgcaaaaatactaaaaagcgttttttaccatcaataaaagttttcttaaaa

SEQ ID NO: 298 - protein, 371 aa, Helicobacter pylori
MDFQLQATDNNARAGLLNLAHSQVATPVFMPVGTQGCIKSLDATDAQEILGAKLILANTYHMYLRPGEKVVEELGGLHRFAQFYGSFLTDSGGFQAFSLSDNVKLQEDGIVFKSHIDGSKHLFTPAKVLDIQYSLNSDIMMVLDDLVGLPAPLKRLEESIKRSAKWANMSLEYHKEKNRPSNNLFAIIQGGTHLKMRSLSVGLTHEGFDGYAIGGLAVGESADEMLETIAHTAPLLPKDKPRYLMGVGTPENILDAISLGVDMFDCVMPTRNARNATLFTHSGKISIKNAPYKLDNTPIEENCACYACKRYSKAYLHHLFRAKELTYARLASLHNLHFYLELVKNARNAILEKRFLSFKKEFLEKYNSRSH

SEQ ID NO: 299 - DNA, 1357 bp, Helicobacter pylori
  CDS (51)...(1304)
gtggatgctgattttttaggcgatggttttgggaataaaagggaacaaaaatgaaaaaagtctatttcaaaacttttgggtgcaggacgaatctttttgacacgcaagtgatgagcgagaatttgaaggactttagcacgaccttagaagaacaagaagccgatattattatcatcaattcttgcaccgtgaccaatggggccgatagcgcggtaaggagttacgctaaaaaaatggcacggttggataaggaagtgctatttactggttgcggggtgaaaacccaaggcaaagagctttttgaaaaagggtttttaaagggcgtttttgggcatgacaataaagaaaagattaacgcgcttttacaagaaaaaaagcgtttttttatagatgacaatttagaaaacaagcacttagacaccacgatggtgagcgagtttgtgggaaaaactagggcgtttattaagatccaagaaggctgtgattttgattgcaattattgcattatcccaagcgtgagagggagggctaggagttttgaagagagaaaaattttagagcaagtgggccttttatgctctaaaggggttcaagaagtggttttaaccggcaccaatgtggggagctatgggaaagatagaggaagcaatatcgcgcgattgattaaaaaattaagccagatcgctggattaaaacgcataaggattgggagcttagaacctaatcaaattaacgatgaatttttagagcttttagaagaggattttttagaaaaacatttgcatatcgctttacagcacagccatgatctcatgctagagaggatgaatcgaagaaaccgcactaaaagcgatagggaattattagaaacaatcgcttctaagaattttgctattggcacggattttattgtggggcatccgggcgagagcggaagcgtttttgaaaaagcgtttaaaaatttagaaagcttgcctttaacgcacatccacccttttatttacagcaaacgaaaagacaccccctctagcttgatgactgatagcgtgagtttggaagattctaaaaagcgtttgaatgcgattaaagatttgatttttcataaaaataaggcgttcaggcaattgcagctcaagctcaatacgcctctaaaagccttagtggaagtgcaaaaagacggcgaatttaaagccttagatcaatttttcaaccccattaaaatcaaaagcgataagcctctaagggctagttttttagaaatcaaagagtatgaaattaaggagagggaaaatcatgccgttttctaaaaatttagaaaatcttaccgctcccttcaaacgcattaaaaaccgctcgc

SEQ ID NO: 300 - protein, 418 aa, Helicobacter pylori
MKKVYFKTFGCRTNLFDTQVMSENLKDFSTTLEEQEADIIIINSCTVTNGADSAVRSYAKKMARLDKEVLFTGCGVKTQGKELFEKGFLKGVFGHDNKEKINALLQEKKRFFIDDNLENKHLDTTMVSEFVGKTRAFIKIQEGCDFDCNYCIIPSVRGRARSFEERKILEQVGLLCSKGVQEVVLTGTNVGSYGKDRGSNIARLIKKLSQIAGLKRIRIGSLEPNQINDEFLELLEEDFLEKHLHIALQHSHDLMLERMNRRNRTKSDRELLETIASKNFAIGTDFIVGHPGESGSVFEKAFKNLESLPLTHIHPFIYSKRKDTPSSLMTDSVSLEDSKKRLNAIKDLIFHKNKAFRQLQLKLNTPLKALVEVQKDGEFKALDQFFNPIKIKSDKPLRASFLEIKEYEIKERENHAVF

SEQ ID NO: 301 - DNA, 574 bp, Helicobacter pylori
  CDS (51)...(521)
agtttaaggattgcaaccatttgttgcaaaaatcttaaaaaaggtggaagatgaaaaaatttggtttgggggtgtatttgcttcttttaggtattttgggcggctctttgatcattctaggagcgatagtcgcgcccattgttttcaaagcttcaagcgttttacctgaattgcatctgactccctttgagagcgggaaactcatggcgcaaatctttgtgcgtttcaattatgttttaggcgcgatcggttttgtagtgttactttatgaaatcatttcgtttatttattacaaaagatcgttagtgtatttgatccttggcgtggcgataggggcgttgtgtttgctctttgttttttattacacgccttatattttaaacgctcaaaaagcgggcgaagccgcgcttcaaagtgctgaatttgcccgctcgcacgctcaaagcgaatggttgtttaaggaattgtttgtgctggtgtgcgctttgtttttttggcgtttgcttggaaaaaatgtgctttagtccctttgatttaatcaaatgagagagtttttggctactatctaggaaat

SEQ ID NO: 302 - protein, 157 aa, Helicobacter pylori
MKKFGLGVYLLLLGILGGSLIILGAIVAPIVFKASSVLPELHLTPFESGKLMAQIFVRFNYVLGAIGFVVLLYEIISFIYYKRSLVYLILGVAIGALCLLFVFYYTPYILNAQKAGEAALQSAEFARSHAQSEWLFKELFVLVCALFFWRLLGKNVL

SEQ ID NO: 303 - DNA, 1780 bp, Helicobacter pylori
  CDS (51)...(1727)
ataacccggtgtttttgatagacaaatacgaagccgttgctaaaaattaaatgatttttggggattttaaatatcaaaaaagcgttaaaaaactcacagccaccaatcttaatgagcttaaaaacgccctggatttcatctctcaaaatagggggaatgggtattttgtggggtatcttttatatgaagcgcgcttagcgtttttagatgaaaattttcaaagccaaaccccttttttgtattttgaacaatttttagaaagaaaaaaatattctttagagcctttaaaagagcatgcgttttaccctaaaatccatagttctttagatcaaaaaacttatttcaagcagtttaaagccgttaaagagcgtctcaaaaacggcgacacctatcaagtgaatctcacaatggatttatttttagacactaaagccaaaccaaagcgcgtttttaaggaggtggtacacaaccaaaacacgccttttaaggcttttatagaaaatgagtttgggagcgttttaagcttttcgccggaattgttttttgaattagagtttttagatacagcgattaagattattacaaaacccatgaaaggcacgatcgctcgctcaaaaaaccccttaatagatgaaaaaaaccgattgtttttgcaaaatgatgacaaaaacagaagcgaaaatgtgatgattgtggatttattgcgtaacgatttgagccgcttggccttaaaaaatagcgtgaaagtcaatcaattgtttgaaatcatcagcttgcctagcgtgtatcaaatgataagcgagattgaagcgaaattgcccctaaaaaccagcttgtttgagatttttaaggcgttgttcccttgcggctctgtgaccggatgccctaaaatcaaaaccatgcaaatcattgaaagtttagaaaaacgccctaggggggtgtattgcggggcgataggcatggttgaagaaaaaaaagccctttttagcgtgcctatccgcactttagaaaaaagagtgcacgaaaattttttgcatttaggggtagggagtggggtaacttataaaagtaaagcgccaaaagaatatgaagaaagctttttgaaatccttttttgtgatgcccaaaatagaatttgagattgtagaaacgatgaaaattatcaaaaaggatcaaaaattagagattaataataaaaacgcccataaagaacgcttaatgaatagcactcgatattttaactttaaatacgatgaaaatcttttagattttgaattagaaaaagaaggggttttaagggttttactcaataaaaagggcaagctcattaaagaatacaaaaccttagagcctttaaaaagcctagaaatccgtttgagtgaagcccccattgataaacgcaatgattttttataccataagaccacttatgcccctttttatcaaaaggctcgagcgctcattaaaaagggcgttatgtttgatgaaatcttttataaccaggatttggaactcactgagggcgctaggagcaatcttgttttagaaatccataacaggcttttaaccccttattttagcgcgggcgcgttaaacgggacgggtgttgtggggttgttaaaaaagggtcttgttgggcatgcacctttgaaattgcaagatttgcaaaaagcgtctaaaatctattgtattaacgcgctatatggcttagtggaagtgaaaataaaataactataaaaacagagcggctaaaacctcatttttagaaataggttacccaa

SEQ ID NO: 304 - protein, 559 aa, Helicobacter pylori
MIFGDFKYQKSVKKLTATNLNELKNALDFISQNRGNGYFVGYLLYEARLAFLDENFQSQTPFLYFEQFLERKKYSLEPLKEHAFYPKIHSSLDQKTYFKQFKAVKERLKNGDTYQVNLTMDLFLDTKAKPKRVFKEVVHNQNTPFKAFIENEFGSVLSFSPELFFELEFLDTAIKIITKPMKGTIARSKNPLIDEKNRLFLQNDDKNRSENVMIVDLLRNDLSRLALKNSVKVNQLFEIISLPSVYQMISEIEAKLPLKTSLFEIFKALFPCGSVTGCPKIKTMQIIESLEKRPRGVYCGAIGMVEEKKALFSVPIRTLEKRVHENFLHLGVGSGVTYKSKAPKEYEESFLKSFFVMPKIEFEIVETMKIIKKDQKLEINNKNAHKERLMNSTRYFNFKYDENLLDFELEKEGVLRVLLNKKGKLIKEYKTLEPLKSLEIRLSEAPIDKRNDFLYHKTTYAPFYQKARALIKKGVMFDEIFYNQDLELTEGARSNLVLEIHNRLLTPYFSAGALNGTGVVGLLKKGLVGHAPLKLQDLQKASKIYCINALYGLVEVKIK

SEQ ID NO: 305 - DNA, 958 bp, Helicobacter pylori
  CDS (51)...(905)
ttagtggatattttatacgcttttattgatcctagaataaggttgtcataatggagtcttttagagagtttatccaacaattcaaaaaaaataaggcagcggtcgttggggcttggattgtgcttttattggtaatttgcgcgatttttgcgccccttttagccccgcatgatccttatgtccaaaacgcgcaagatcgccttttgaagcctatatgggagcatggagggaatgctaaataccttttaggcaccgatgatttggggcgcgatattttgagccgcttgatctatggggccaggatttctttaaccatagggattgtttctatggggattgcggtgttttttggcacgatactagggctaatagcggggtattttggggggaaaacagatgcaattatcatgcgtatcatggacatcatgttcgctttgccctctattttattgatcgtgattgtggtcgcggtgttagggccttcactcactaacgccatgctcgctattgggtttgtggggattcctgggtttgcaagattggtgcgcagttccgtgctaggtgaaaaagaaaaagaatacgtgatcgcttctaaaatcaatggctcttcgcatcttcgtttgatgtgtaaggtgattttccctaattgcattatccctttaatcgttcaaacgacaatgggttttgcttccacggttttagaagcggctgcactgagcttcttaggtcttggggcccaacctcccaaacccgaatggggagcgatgttgatgaattccatgcaatacatcgctaccgctccttggatgcttgttttccctggggtgatgatttttttaacggtcatgagttttaatctggtaggcgatggcatcatggacgctttagatcctaaacgcacctcttaaaaggagcttgcatgattttagaagttaaagatttaaaaacttattttttc

SEQ ID NO: 306 - protein, 285 aa, Helicobacter pylori
MESFREFIQQFKKNKAAVVGAWIVLLLVICAIFAPLLAPHDPYVQNAQDRLLKPIWEHGGNAKYLLGTDDLGRDILSRLIYGARISLTIGIVSMGIAVFFGTILGLIAGYFGGKTDAIIMRIMDIMFALPSILLIVIVVAVLGPSLTNAMLAIGFVGIPGFARLVRSSVLGEKEKEYVIASKINGSSHLRLMCKVIFPNCIIPLIVQTTMGFASTVLEAAALSFLGLGAQPPKPEWGAMLMNSMQYIATAPWMLVFPGVMIFLTVMSFNLVGDGIMDALDPKRTS

SEQ ID NO: 307 - DNA, 791 bp, Helicobacter pylori
  CDS (95)...(727)
  misc_feature 71: n = A,T,C or G
ccttgttaaaaatgttagttggtgcaagcttgctgacacacgccttaatagctaaagaagaaagcgcagcncttcttggacaaaaaatttgtatatgggagtcaattaccaaacaggttctatcaatttaatgactaatatccatgaagttagagaagttactaactatcaaaccggttacaccaatattataactagcgttaatagcgttaaaaagctcaccaacatgggatctaatgggattggattagtcatgggttataaccactttttccatccggataaaatcttgggcttgcgctatttcgcttttttagattggcaaggctatggcatgagataccctaaaggctattatggcggcaataacatgatcacttatggcgtgggcgtggatgcagtgtggaatttctttcaagggagtttctatcaagatgacattagcgtggatattggcgtttttggggggattgcgattgcggggaatagctggtatattggcagtaaagggcaggaattgttaggtatcactaacagcagcgcggttgataacacctcttttcaattcctctttaactttggcctcaaggctttatttgtagatgagcatgaatttgaaatcggttttaaattccccaccattaataacaaatactacaccactgacgcgctcaaggttcaaatgcgtagggtctttgccttttatgtggggtataattaccacttctaaagggcttttaaaacccaacgcaactccctaacatcttttggtaatagctcttggctttgag

SEQ ID NO: 308 - protein, 211 aa, Helicobacter pylori
MGVNYQTGSINLMTNIHEVREVTNYQTGYTNIITSVNSVKKLTNMGSNGIGLVMGYNHFFHPDKILGLRYFAFLDWQGYGMRYPKGYYGGNNMITYGVGVDAVWNFFQGSFYQDDISVDIGVFGGIAIAGNSWYIGSKGQELLGITNSSAVDNTSFQFLFNFGLKALFVDEHEFEIGFKFPTINNKYYTTDALKVQMRRVFAFYVGYNYHF

SEQ ID NO: 309 - DNA, 517 bp, Helicobacter pylori
  CDS (51)...(464)
agatttcattcgaggtagaaaatacattgaaaaagcgtgtgaattaaacgatggtagggggtggaacggtaaaaaaagacttgaagaaagccattcaatactatgttaaagcgtgtgaattgaatgaaatgtttgggtgtctgtcattagtttcgaactctcaaataaacaaacaaaaactctttcaatatctctctaaagcttgtgaattaaatagtggtaatggatgtaggtttttaggggatttttatgagaatggaaaatatgtaaaaaaggatttaagaaaagctgctcaatactactctaaagcttgtggattaaatgatcaagatgggtgtttaatactaggatataagcaatatgctggcaagggcgtagtcaaaaatgaaaaacaagcggtgaaaacctttgaaaaggcttgtaggttaggatctgaagacgcatgtggtattttaaacaactactagatttgaaataaatgctgttttttagctggctttcatgtttttgtaacccc

SEQ ID NO: 310 - protein, 138 aa, Helicobacter pylori
MVGGGTVKKDLKKAIQYYVKACELNEMFGCLSLVSNSQINKQKLFQYLSKACELNSGNGCRFLGDFYENGKYVKKDLRKAAQYYSKACGLNDQDGCLILGYKQYAGKGVVKNEKQAVKTFEKACRLGSEDACGILNNY

SEQ ID NO: 311 - DNA, 451 bp, Helicobacter pylori
  CDS (51)...(398)
gtggaacgctctgtcttagcaaattgatcttagcggcgtcgtttttgatagtggattcagaggggttttcgccttctatttataccgacaagacagggcatcccacgattggctatggctataatttgagcgtttattcttatgagggtaagcgtatcaccaaaacatatgggcttttaactgacatactctcttatgggtggtataaaaatttggacgcaatgaggagaatggtcatcttggatttgagctacaatttaggcttgaacggactgctcaaattcaagcaattcatcaaggccatagaggataaaaattatgctttggctgtggagagactgcaaaaaagcccgtatttcaatcaagtgaaaaaagagcgtcaaggaatatggaaattttgaaattggagggttgcgaaaaacattgtaagaaaaaatacgcaatagaaaag

SEQ ID NO: 312 - protein, 116 aa, Helicobacter pylori
VDSEGFSPSIYTDKTGHPTIGYGYNLSVYSYEGKRITKTYGLLTDILSYGWYKNLDAMRRMVILDLSYNLGLNGLLKFKQFIKAIEDKNYALAVERLQKSPYFNQVKKERQGIWKF

SEQ ID NO: 313 - DNA, 399 bp, Helicobacter pylori
  CDS (50)...(346)
acacaaccatagcgaccaaaaacccgacagacccgccaaggagcgataaaacccacaaagctttttcaggaatacgccacattttttgatcagccgaatttttatccaccagcatgagaataaaaatcagaatattgactatgagcaaccaaacgatagaagcaaattccacgctcaccctttcaagagcgttttaacaacccaaacgctaccacttggttttttagagagagaaagagagagaaagcaaaattttaagattgattctcaaatctattcctttgcaaaagttaagattgggtgttttaacatgatttttggcctgctcgcatcaagcccttatttttaacatttccgctcccttgcttttttaaagcctccctaaattactacaccact

SEQ ID NO: 314 - protein, 99 aa, Helicobacter pylori
NPQSFFRNTPHFLISRIFIHQHENKNQNIDYEQPNDRSKFHAHPFKSVLTTQTLPLGFLERERERKQNFKIDSQIYSFAKVKIGCFNMIFGLLASSPYF

SEQ ID NO: 315 - DNA, 522 bp, Helicobacter pylori
  CDS (51)...(470)
aaagacaaccctaacaaacgcttcaaaaacaacaagagggataaaaaataatgtcttatttttttaaaatcattctgggcacaagcgtgatcgtgggggtgttgttgggcttgtggcgtttgacttacgataagttctatttctcgttggtctttgtgttgctgatactagggattgtcgcttgtagctatatttctttaaaaatgcatcagaggaaatgcttcgccaagtgtttcgtgaatagtgaatcttttttatccaagatgttacactccccaataatggtaatttgcttttattttattttttcaattttcacatccatatccatcgtctatagcgtgctggactatgatcagatgatgtgggggtttgttttttgcactatcgttgtttgcgctgtggtgtttggcacgcttgaaaaaaatgctcaagagtaccatcaaagaagattatttgatgctgatgtctagagaagtgagtgcttttgtggggactcttttcttcattggcttgagttgc

SEQ ID NO: 316 - protein, 140 aa, Helicobacter pylori
MSYFFKIILGTSVIVGVLLGLWRLTYDKFYFSLVFVLLILGIVACSYISLKMHQRKCFAKCFVNSESFLSKMLHSPIMVICFYFIFSIFTSISIVYSVLDYDQMMWGFVFCTIVVCAVVFGTLEKNAQEYHQRRLFDADV

SEQ ID NO: 317 - DNA, 976 bp, Helicobacter pylori
  CDS (51)...(923)
  misc_feature 116: n = A,T,C or G
cccactgaagcgtattctaacacccttttagaattagctaaaaaagatgaaaaaatcgtaggcgtaaccgcggcgatgctagcggcacaggattagacaaactcattgacgcttancctttgcgcttttttgatgtcgctatcgctgagcaacacgctttaacttctagcagcgctatggctaaagaggggtttaaaccttttgtgagcatctattctacttttttgcagagggcttatgattctattgtgcatgacgcttgtatttctagcttgccgattaaattagccattgacagggctgggattgtgggcgaagatggcgagacgcaccaagggcttttagacgtgtcgtatttgcgctctatccctaacatggtcatttttgccccacgagacaatgagactttaaaaaacgccgtgcgttttgccaatgaacacgattcaagcccttgcgcgttccgataccctagggggtcgtttgcgttaaaagagggggtttttgagcctagcggttttgttttaggccaaagcgaattgttgaaaaaagagggcgaaattttactcataggctatggtaatggcgtggggcgggcgcatttagtccaactggctttaaaagaaaaaaacatagaatgcgctctcttggatctcaggtttttaaagcctttagatccaaatttaagcgcgatcgttgccccttatcaaaagctctatgtttttagcgataattacaagcttggaggggtggctagcgcgattttagagtttttgagcgaacaaaatattttaaagcctgttaaaagctttgaaatcattgatgaatttatcatgcatgggaacaccgctttagtggaaaaatccttaggattagacacagagagtttgactgacgctattttaaaagatttaggacaagagagatgaaaacaaaagcgccaatgaaaaatatccgcaatttttccattatcgctcac

SEQ ID NO: 318 - protein, 291 aa, Helicobacter pylori
  VARIANT 22: Xaa = Any Amino Acid
KNRRRNRGDASGTGLDKLIDAXPLRFFDVAIAEQHALTSSSAMAKEGFKPFVSIYSTFLQRAYDSIVHDACISSLPIKLAIDRAGIVGEDGETHQGLLDVSYLRSIPNMVIFAPRDNETLKNAVRFANEHDSSPCAFRYPRGSFALKEGVFEPSGFVLGQSELLKKEGEILLIGYGNGVGRAHLVQLALKEKNIECALLDLRFLKPLDPNLSAIVAPYQKLYVFSDNYKLGGVASAILEFLSEQNILKPVKSFEIIDEFIMHGNTALVEKSLGLDTESLTDAILKDLGQER

SEQ ID NO: 319 - DNA, 1135 bp, Helicobacter pylori
  CDS (51)...(1082)
ggattaagatgttataatagttgttattttttcattttaaaaggggttttatggcattattattcacaggagcgtgcgggtatataggctcgcataccgcaagggcgtttttagaaaaaaccaaagaaaatatcattattgtagatgacttaagcaccggttttttagagcacctcaaagcgttagagcattattaccctaatagggttgtgtttattcaagcgaatttgaatgaaacgcacaaattagacgcctttttgaataagcagcagctaaaagatcccattgaagccatcttgcactttggggctaaaatctcagtagaagaatccacgcacttgcctttagaatactacaccaacaacacgctcaacactttagagcttgtcaaactttgcttaaaacatgcaatcaagcgttttattttttcttctacggccgtggtttatggcgaatctagttcaagtttgaatgaagaaagccccttaaaccccattaatccttatggagcgtctaaaatgatgagcgaaagaatcttgttagacacttctaaaatagcggattttaaatgcgttattttgcgctatttcaatgtggctggggcatgcatgcacaatgattataccaccccttacacgctagggcaacgcacgctcaacgccacgcatttgatcaaaatcgcatgcgaatgcgcggtggggaaaaggaaaaaaatggggatttttggcactaactaccccacaagagatggcacttgcattagggattatatccatgtagatgatttggctaacgcacatttagcgagctatcaaacccttttagaaaaaaataagagcgagatctataatgtcggctacaatcaaggccatagcgtgaaagaagtgatagaaaaggtcaaagaaatctcaaacaacgattttttagtggaaattttagacaaacgacagggcgatccagcaagccttattgccaataacgctaaaatcttacaaaacacctctttcaaacccctttataacaacctagacaccattatcaaaagcgctctagattgggaagaacaccttttgaggtttcaataatacaccctgtgcaaatacaagccattagccattatgggcgttcttatagt

SEQ ID NO: 320 - protein, 344 aa, Helicobacter pylori
MALLFTGACGYIGSHTARAFLEKTKENIIIVDDLSTGFLEHLKALEHYYPNRVVFIQANLNETHKLDAFLNKQQLKDPIEAILHFGAKISVEESTHLPLEYYTNNTLNTLELVKLCLKHAIKRFIFSSTAVVYGESSSSLNEESPLNPINPYGASKMMSERILLDTSKIADFKCVILRYFNVAGACMHNDYTTPYTLGQRTLNATHLIKIACECAVGKRKKMGIFGTNYPTRDGTCIRDYIHVDDLANAHLASYQTLLEKNKSEIYNVGYNQGHSVKEVIEKVKEISNNDFLVEILDKRQGDPASLIANNAKILQNTSFKPLYNNLDTIIKSALDWEEHLLRFQ

SEQ ID NO: 321 - DNA, 1170 bp, Helicobacter pylori
  CDS (97)...(1119)
ggagttttttctggcttttagggggttttaaattcttttaaggtattctaacaagactatatcattgagatagttttaaggaaattaaggaacaaaatggaagtttcacgcaagaaaatttacaaccccaattctacagaaagtgtgaatgaaagaaagatttttgggggcaatcctacaagcatgtttgatttgaataagatcaagtatcaatgggcggatcatttgtggaaaacgatgctcgctaacacctggtttgctgaagaagtgagcatgaatgatgacaaaagggattatttgaaattaagcgcagaggaaaagatcggttatgacagagctttagcgcaactcatttttatggacagcttgcaagcgaataatttaattgacaatatcaatcccttcatcaccagccccgaaatcaatttgtgtttggtgcgtcaagcttatgaagaagccctacacagccatgcgtatgcggtgatggtagaaagcataagtgcgaatactgaagagatttatgacatgtggcgtaacgatatgcaattaaaaagcaagaacgactatatcgcgcaagtgtatatggaattagccaaaaaccccacagaagaaaacattctcaaagcgctttttgctaaccagattttagaggggatttatttttatagcgggtttagctatttttacactttggctaggagcggtaaaatgctaggatcggcacaaatgattcgttttatccaaagagatgaggtaacgcatttgattttgttccaaaacatgatcaacgctttaaggaatgaaagagcggatctcttcacgccgcaattgattaatgaagtcataggaatgtttaaaaaagcggtagaaattgaagctttgtggggggattatatcacgcaaggcaagattttagggctcacttcaagcttgattgagcaatacatccagtttttagcggatagccgtttgagtaaggtgggcatcgctaaagtttatggcgtccaacaccccattaaatgggtagagagcttttcaagtttcaatgagcagcgctctaatttctttgaggctagggtgagcaattacgctaaagggagcgtgagttttgatgatttttaaggggcttgtttgaatagtattaaaaaccatttaatgtgtgaagaaatc

SEQ ID NO: 322 - protein, 341 aa, Helicobacter pylori
MEVSRKKIYNPNSTESVNERKIFGGNPTSMFDLNKIKYQWADHLWKTMLANTWFAEEVSMNDDKRDYLKLSAEEKIGYDRALAQLIFMDSLQANNLIDNINPFITSPEINLCLVRQAYEEALHSHAYAVMVESISANTEEIYDMWRNDMQLKSKNDYIAQVYMELAKNPTEENILKALFANQILEGIYFYSGFSYFYTLARSGKMLGSAQMIRFIQRDEVTHLILFQNMINALRNERADLFTPQLINEVIGMFKKAVEIEALWGDYITQGKILGLTSSLIEQYIQFLADSRLSKVGIAKVYGVQHPIKWVESFSSFNEQRSNFFEARVSNYAKGSVSFDDF

SEQ ID NO: 323 - DNA, 689 bp, Helicobacter pylori
  CDS (139)...(627)
caaaagctcattgaagaaaccccggcagtggttttagaagagggcgtgcgtgacgtttgctagaaacagcgatcaaggccgctaaatatatcggctrrtgtgggggcggggacttttgaatttttgttggattctaacatgaaagatttttatttcatggagatgaacactcgtttgcaagtggaacacaccattagcgaaatggtgagcgggttaaacctcattgagtggatgattaaaatcgctcaaggcgaaaaattgcccaagcaagaaagcttttctctcaaagggcatgcgatagaatgccgaatcacggcagaagatcctaaaaaattctacccaagcccgggcaaaattaccgaatggatcgctcctggtggggtgaatgtgcgccttgattcgcacgcgcatgccaattatgtcgtgcctacgcactatgattcgatgattggcaagctcattgtgtggggtgaaaacagagaaagagcgatcgctaagatgaaaagggctttaaaggaatttaaagtagaaggcattaaaacgaccattcctttccaccttgaaatgcttgaaaatgcggatttcaggcaagcaaaaatccacacgaagtatttagaagaaaatttttaagttttaaggattcttttaagcatagtttaagggttttaagcgatcagaaaaagtcagca

SEQ ID NO: 324 - protein, 163 aa, Helicobacter pylori
MKDFYFMEMNTRLQVEHTISEMVSGLNLIEWMIKIAQGEKLPKQESFSLKGHAIECRITAEDPKKFYPSPGKITEWIAPGGVNVRLDSHAHANYVVPTHYDSMIGKLIVWGENRERAIAKMKRALKEFKVEGIKTTIPFHLEMLENADFRQAKIHTKYLEENF

SEQ ID NO: 325 - DNA, 1960 bp, Helicobacter pylori
  CDS (51)...(1907)
aacgagtatttgcacaatgaactccaaaagcttttagaaaaaatctcatcatgttctatcacttaatcgctcctttaaaaaataaaaccccccctttaacctatttttctaaagagcaacaccaaaaaggagcgttagtcaatatccctttaaggaataaaacgcttttaggcgtcgtccttgaagaagtttcaaaaccctcttttgaatgcctagagctagaaaaaaccccttattttttactcccctttcaaatggagctcgctatttttatcgctcaatattactcagctaatctttcttcagttttaagcctttttgccccttttaaagaatgcgatttagtggggttagaaaaaattgagcctattcttaatatattaagccaaacgcaaacaaacgctttaaaagaattgcaaaaacattcagcaagcttgctctttggcgatacgggtagcgggaaaaccgagatttatatgcatgcaatcgcccaaactttagagcaaaaaaaaagcgctttattgttggtgccagaaatcgctctcacccctcaaatgcaacaacgccttaaaagggtttttaaagaaaatttaggcttgtggcatagcaaactctctcaaaatcaaaaaaaacaatttttagaaaagctttattcgcaagaaatcaaattagtggtaggcacacgaagcgcgttgtttttaccccttaaagagctgggtttaatcattgtagatgaagagcatgacttttcttataaatcccatcaaagccctatgtataacgctagggatttatgcttgtatttatctcataaattccctattcaagtgatcttaggctctgctacgccaagtttgaatagttataaacgctttaaagataaggctttagtgcgcttaaaggggcgctacacccccacgcaaaaaaacattatttttgaaaaaaccgagcgttttatcacgcccaaactcctagaagcgctacaacaagtcctagacaaaaacgagcaagccattatttttgtgcctacaagggctaatttcaaaaccttgctgtgccaaagttgttacaaaagcgttcaatgccccttttgcagcgtgaatatgagcttgcatttaaagaccaacaaactcatgtgccattattgccatttttcaagccctatccctaaaatttgcagcgcgtgtcaaagcgaagtcttagtgggtaaaaggataggcactatgcaagtgctaaaggaattagagagccttttagagggggctaaaatagcgattttagataaagatcacactagcacgcaaaaaaaactccacaatattttaaacgatttcaacgctcaaaaaacgaatatcttaatcggcactcaaatgataagcaaagggcatgattacgctaaagtgagtttggcggttgttttaggcatagacaatatcatcaaatctaatagttatagggctttagaagaaggcgtgtcgttactttatcaaatcgctgggaggagcgctaggcaaatttctggccaagtgttcattcaaagcaccgaaaccgatctgttagaaaatttcttagaagattatgaagattttttacaatacgaattgcaagaaaggtgcgaactctacccgcctttttctaggctgtgtttgttggagtttaagcataaaaacgaagaaaaagcccaacaattgagcctaaaagcctctcaaaccctttcttcgtgtttagaaaagggcgtaacgctctctaatttcaaagcccccattgaaaaaatcgcttcttcttatcgctaccttattttattgcgttccaaaaaccctttaagcctaatcaaaagcgtgcatgcgtttttaaaatccgcccctagtatcccttgcagcgtgaacatggatcctgtggatattttttaaaaaactcatgttttatatattatttcaaaaaacttaagtttttctggcga

SEQ ID NO: 326 - protein, 619 aa, Helicobacter pylori
MFYHLIAPLKNKTPPLTYFSKEQHQKGALVNIPLRNKTLLGVVLEEVSKPSFECLELEKTPYFLLPFQMELAIFIAQYYSANLSSVLSLFAPFKECDLVGLEKIEPILNILSQTQTNALKELQKHSASLLFGDTGSGKTEIYMHAIAQTLEQKKSALLLVPEIALTPQMQQRLKRVFKENLGLWHSKLSQNQKKQFLEKLYSQEIKLVVGTRSALFLPLKELGLIIVDEEHDFSYKSHQSPMYNARDLCLYLSHKFPIQVILGSATPSLNSYKRFKDKALVRLKGRYTPTQKNIIFEKTERFITPKLLEALQQVLDKNEQAIIFVPTRANFKTLLCQSCYKSVQCPFCSVNMSLHLKTNKLMCHYCHFSSPIPKICSACQSEVLVGKRIGTMQVLKELESLLEGAKIAILDKDHTSTQKKLHNILNDFNAQKTNILIGTQMISKGHDYAKVSLAVVLGIDNIIKSNSYRALEEGVSLLYQIAGRSARQISGQVFIQSTETDLLENFLEDYEDFLQYELQERCELYPPFSRLCLLEFKHKNEEKAQQLSLKASQTLSSCLEKGVTLSNFKAPIEKIASSYRYLILLRSKNPLSLIKSVHAFLKSAPSIPCSVNMDPVDIF

SEQ ID NO: 327 - DNA, 2438 bp, Helicobacter pylori
  CDS (82)...(2373)
aagattagccatgctgacttgccagatcaatgatttgcgcagtttctttgaaactgatttgagagtgttggagagcttttaatgaaactgagcattaatgatttgaatgtttttgtcaatacgcctaaagatatagccaaactctgtgaggatttgagtcgcttaggtttagaagtggaaagctgtatcccttgtatcgctcctaaaaatgtggttgtgggtaaaattttagaaaaagccccccataaaaacgctgaaaaactcagcgtgtgtcaagtggatgtgggtaaagaagtgttgcaaatcgtgtgtggggctaaaaatgtcgcgccaaaccaattcgtgccagtcgctttaaacggggcgctaatcggctcaaccaccatcgctaaaacggagcttaggggggttgaaagccatggcatgatttgctctagcattgaattaggcttccctaaaatcaatgatggcatcttggaattagatgagagcgttggggagttggttttagggaaagaattaaacgaatacgcccctttcaacacgcatgttttagaaatttcattgactcccaatcgtggggattgcttgagcgttttaggtattgccagagaaattagcgccttttatcacacgcccctaaagcctattaaggctttaaattttacgcccaaaagcggtttgatcacgcttagtgcgggtgaaaatattgaatcgcatctggcttattatttgatttgcaaccattcattaaaaacccctttaaatatcaaactttcgctcgctcataataatgccttgagtgagaacgatctgaacaatttcatagaatttagcacgcattttagtggggtaataatgaacgcttatagcctaaatacaacccctatggatttgagcgtgaaaaacgatgaaaacaaccttgaaagcgtttatatcaaccatcaaaaacgctccacgatcgctatcaagcatcaagttcaaaaagatttgagcgagtgtttgcttttagaggcaagttacaccgatccgataagcctgtctttaaaattacacgccctaaaagataaaacgcttcaaaaagacaacgcccttatttatagaagcgctagggggagtaaccctaatttatcagacggcttgaattttttaagcgctcatttgaaagccacgattttagaaagcaaacaaactgagcattctttaaaagatcgcacccttacattccagcttgaagacattactgaaattttggggcttgctgtagagaaagaaaaaattcaaggcattttaaaaaatttaggctttaaagtcagcgtaaaagagccaaactcaaaaccccaaattttagaggttattgcgccaaatttcaggcatgacattaaaacgatccaagatattgctgaagaaattttgcgctttgtagggattgataatctagtctcaaagccccttcattgtgtcagtagcaaaaattcaaaccccaattacgacacgcaccgcttttttgaaaaccttaaacacaaggctctcgcttgcggttttaaagaagtcattcattacgtgttttactctaaagaaaaacagcaaaaattaggctttgaagttttagaagatcccctagaattgcaaaaccctatcacaacggagttaaacaccctaaggacgagtcttgtttgcgggcttttagacgccagtttaaggaataaaaatttagggtttaaaagcatagccctttatgaaaaggggagcgtgtataactctaaaagagaagaaatccaaaaactaggctttttaataagcggcttgcaaaaaaaagaaagctaccctgatactaagggcaaggcttgggatttttactcttttgccgaatgcgtttcaaaagttataggggatttcagcttggaaaaactaaccactcaaacccccattaaccacccctaccagagcgctaaaatcattcaaaatcatgaaatcataggcgtgatcgctaaaatccaccctaaagtgatccaggaattggatttgtttgaaagctattacgctgagatagacgcttttaaactcaaacgccctgctatgctattaaaaccctttagcatttatcctagcagtgttagggatttgactctcatcattgatgagaataccgcttttagtgggattaaaaaagccctaaaggacgctcaaatccctaatttaagcgagattctaccccttgatatttttaaagaaagtaataattccatagccttaagcgtgcgttgcgtgatccattctttagaaaaaaccctgaatgatgaagaggtcaattcagccgtgcaaaaagcacttgaaattttagaaaaagaatttaacgcccgccttaaaggataatataaaggataatatgtgatagagcttgacattaacgctagcgataaatcgctctcacacag

SEQ ID NO: 328 - protein, 764 aa, Helicobacter pylori
MKLSINDLNVFVNTPKDIAKLCEDLSRLGLEVESCIPCIAPKNVVVGKILEKAPHKNAEKLSVCQVDVGKEVLQIVCGAKNVAPNQFVPVALNGALIGSTTIAKTELRGVESHGMICSSIELGFPKINDGILELDESVGELVLGKELNEYAPFNTHVLEISLTPNRGDCLSVLGIAREISAFYHTPLKPIKALNFTPKSGLITLSAGENIESHLAYYLICNHSLKTPLNIKLSLAHNNALSENDLNNFIEFSTHFSGVIMNAYSLNTTPMDLSVKNDENNLESVYINHQKRSTIAIKHQVQKDLSECLLLEASYTDPISLSLKLHALKDKTLQKDNALIYRSARGSNPNLSDGLNFLSAHLKATILESKQTEHSLKDRTLTFQLEDITEILGLAVEKEKIQGILKNLGFKVSVKEPNSKPQILEVIAPNFRHDIKTIQDIAEEILRFVGIDNLVSKPLHCVSSKNSNPNYDTHRFFENLKHKALACGFKEVIHYVFYSKEKQQKLGFEVLEDPLELQNPITTELNTLRTSLVCGLLDASLRNKNLGFKSIALYEKGSVYNSKREEIQKLGFLISGLQKKESYPDTKGKAWDFYSFAECVSKVIGDFSLEKLTTQTPINHPYQSAKIIQNHEIIGVIAKIHPKVIQELDLFESYYAEIDAFKLKRPAMLLKPFSIYPSSVRDLTLIIDENTAFSGIKKALKDAQIPNLSEILPLDIFKESNNSIALSVRCVIHSLEKTLNDEEVNSAVQKALEILEKEFNARLKG

SEQ ID NO: 329 - DNA, 1097 bp, Helicobacter pylori
  CDS (492)...(1040)
tttcttttattaaagttgtattatagctttttaaaaataaaatataaggatcgttattgcacaccttaatagagcgattagaaaaggttactaatagcaaagagttagaagaagcgcgcttgaatgctttgggtaaaaaaggggtttttgcggataaattcaaccagctcaaacatctgaacggcgaagaaaaaaacgcctttgctaaagaaatccaccattataaacaagcgtttgaaaaagcctttgaatggaaaaaaaaggctattatagagcttgaattagaagaacgcttgaaaaaagaaaaaattgatgtgagcttgtttaacgctatcaaaacaagctcttctcaccctttaaactacactaaaaataaaatcattgaatttttcaccccattaggatacaagcttgaaatcggctctttagtggaagatgatttccataatttcagcgctttaaacttgcccccttaccatcctgcaagagacatgcaagacactttttattttaaagatcacaagcttttaaggacccacacttcgcccgtgcaaatccacaccatgcaagaacaaaccccacccattaagatgatttgtttaggcgaaacctttaggcgcgattatgatttgacccacacgcccatgttccaccaaattgaagggcttgtcgtggatcaaaaagggaatatccgtttcacacatttaaaaggtgtgatcgaagactttttgcattatttctttgggggcgtgaagttaaggtggcgctctagctttttccctttcacagagccaagcgctgaagtggatattagttgcgtgttttgcaagcaagaaggctgtagggtttgctcgcacacaggctggttagaagtgttgggctgtggcatggtcaataatgcggtgtttgaagccatagggtatgagaatgtgagcgggtttgcttttggcatggggattgaaagattagccatgctgacttgccagatcaatgatttgcgcagtttctttgaaactgatttgagagtgttggagagcttttaatgaaactgagcattaatgatttgaatgtttttgtcaatacgcctaaagatatag

SEQ ID NO: 330 - protein, 183 aa, Helicobacter pylori
MQDTFYFKDHKLLRTHTSPVQIHTMQEQTPPIKMICLGETFRRDYDLTHTPMFHQIEGLVVDQKGNIRFTHLKGVIEDFLHYFFGGVKLRWRSSFFPFTEPSAEVDISCVFCKQEGCRVCSHTGWLEVLGCGMVNNAVFEAIGYENVSGFAFGMGIERLAMLTCQINDLRSFFETDLRVLESF

SEQ ID NO: 331 - DNA, 517 bp, Helicobacter pylori
  CDS (51)...(464)
tattgactttcatagaaagtattttaacctctttttgttaaaataggtctatgaaaaaaattgatgatatgagacacggaagacattgtgtttttttaatgcatgtgcattttgtatttgttactaaatacaggcgttcagcattcaataaggaagtgatagattttttaggatcggtgtttgccaaagtgtgtaaggactttgagagcgaattggtagaatttgatggggagagcgatcatgtgcatttgcttatcaactaccctccaaaagtgagcgtgagtaagttagttaattctttaaaaggcgttagcagtcgtttgactagacaacaccatttcaaaagcgttgaagctagtttgtgggggaagcatttatggtcgcctagttatttcgctgggagttgtggggacgcgcctttagagatgattaagcaatacatacaagatcaagaaacaccgcattaaattagctaactttgatttttaagtagaacgcgctaaaaagcgaatggatc

SEQ ID NO: 332 - protein, 138 aa, Helicobacter pylori; identical to SEQ ID NO: 114

SEQ ID NO: 333 - DNA, 1786 bp, Helicobacter pylori
  CDS (51)...(1733)
aaaaataacccccatctctttaaaaccttatcataatgaaaggataaaaaatgcaagaagtccatgattatgggattaaattttggagcaataacgaatttaagatagaaaaaggcttggttaaagtctgtcatggtaaaaacccctcgcttttagaaatcgttcaaagcgtgcgcgataagggctatagaggacctttgttggtgcgattcccccatttggtgcaaaaacaaatcaaaagcctgtttgatgcgttttcttcagcgattaaagagtatcaatacagcggggcttttaaggcggttttccctttaaaagtcaatcaaatgccctcgtttgttttccctttagtgcagggggctaagggtttgaattacggattagaggctgggagcaagtctgaactcatcatcgcaatgagttacactaaccctaaagcccctatcaccgtgaatggctttaaagacaaagaaatgattgagcttggctttatcgctaaaagcatgcagcatgagatcactttaacgattgagggtttgaatgaattgaaaaccattatcgccgtggctaaacaaaacgagtttttagcctgccctaaaattggcatccgcatccgtttgcacagcactggcactggcgtttgggcaaagagtggggggatcaattctaaatttggtcttagcagcactgaagttttagaggcgatgcgccttttagaagaaaacgacttgttagagcatttccacatgatacatttccatataggctctcaaatcagcgatatttcgcccttaaaaaaggctttaagagaagcgggtaacttgtatgcagaattgcgtaaaatgggcgctaaaaatcttaatagcgtgaatattggaggggggttagccgtagaatacacccaacacaagcaccaccaagacaaaaactacactttagaggaattcagcgctgatgtggtgtttttattgagagaaattgtgaaaaataagcaggaaatcgagccggacattttcattgaatcaggccgttatatttccgctaaccatgccgttttagtggccccggtgttagaattgttttcgcatgaatacaatgaaaaatccctaaaaatcaaagaaaataataacccccctttgattgatgaaatgctagacttgctcgctaatatcaatgaaaaaaacgccattgaatacttgcatgatagttttgatcacaccgagtcgctattcacgctttttgatctgggctatattgatttgattgacaggagcaacactgaagttttagcccatttgatcgtcaaaaaagcggtgcaattgctttatgttaaggatcataacgatattttacgcattcaagagcaggtccaagagcgctatttattgaattgctcgtttttccaaagcttgccggattattggggcttgagacagaatttcccggtcatgcccttgaataaattagatgaaaagcccaccaggagtgcgagcttgtgggatattacttgcgatagcgatggggaaatcgcttttgattccacgaagcccttgtttttgcacgatatagatatagatgaagaagaatactttttagcgttctttttagtgggagcgtatcaagaagttttaggcatgaaacacaatttattcacgcacctacggaatttagcgtggtttttgatgaaaaaggcgattatgaagtggaagatatttgtgaagcccaaacgattttagatgtgctagacgatttagactatgacactaaagagatcgagcgcctttta

SEQ ID NO: 334 - protein, 561 aa, Helicobacter pylori
MQEVHDYGIKFWSNNEFKIEKGLVKVCHGKNPSLLEIVQSVRDKGYRGPLLVRFPHLVQKQIKSLFDAFSSAIKEYQYSGAFKAVFPLKVNQMPSFVFPLVQGAKGLNYGLEAGSKSELIIAMSYTNPKAPITVNGFKDKEMIELGFIAKSMQHEITLTIEGLNELKTIIAVAKQNEFLACPKIGIRIRLHSTGTGVWAKSGGINSKFGLSSTEVLEAMRLLEENDLLEHFHMIHFHIGSQISDISPLKKALREAGNLYAELRKMGAKNLNSVNIGGGLAVEYTQHKHHQDKNYTLEEFSADVVFLLREIVKNKQEIEPDIFIESGRYISANHAVLVAPVLELFSHEYNEKSLKIKENNNPPLIDEMLDLLANINEKNAIEYLHDSFDHTESLFTLFDLGYIDLIDRSNTEVLAHLIVKKAVQLLYVKDHNDILRIQEQVQERYLLNCSFFQSLPDYWGLRQNFPVMPLNKLDEKPTRSASLWDITCDSDGEIAFDSTKPLFLHDIDIDEEEYFLAFFLVGAYQEVLGMKHNLFTHLRNLAWFLMKKAIMKWKIFVKPKRF

SEQ ID NO: 335 - DNA, 676 bp, Helicobacter pylori
  CDS (51)...(623)
ttaaagaggataaagagaatagtgatagcgataatgatactgcagacacgatggatgaagtcttaaaagagattttatcaagttatcaaaaaagagctttaaaattaaccaaaagagttagaaagaagatttttaagaatgatcccacagaaaatcaaaaaaaagccataaagatcgctctaaatacccctgatattgctattatccaagggcctcctggaacgggcaaaaccactgtgatcaatgccatttgtgagagattgtttgaagaataccctaaggataaaaatatcaaggggcaaattttactgtgcgctcaagggcatgatgcgactaacaatgcgcgtgagcgcatcaaagtagggggattgcccacttttaaatttggtgctaaaaaaaatgctaaagaagaacaatacaagcaagatgaaagattgaatgagcgattgagagagtttgctgaaacgctcatagaaagcgtgagaaaaaaactgcaaaaattaggggattatgaaaatatagaaaaaattttggatttagaagaagcccttagacgctactatagttcgcctatcagtgaattggaatttttaaaagaaatagaaaaaaatgagagctttttttaattcttctatgcgtgaaaagctaagccaattaaaagcaaggcagcaaaaac

SEQ ID NO: 336 - protein, 191 aa, Helicobacter pylori
MDEVLKEILSSYQKRALKLTKRVRKKIFKNDPTENQKKAIKIALNTPDIAIIQGPPGTGKTTVINAICERLFEEYPKDKNIKGQILLCAQGHDATNNARERIKVGGLPTFKFGAKKNAKEEQYKQDERLNERLREFAETLIESVRKKLQKLGDYENIEKILDLEEALRRYYSSPISELEFLKEIEKNESFF

SEQ ID NO: 337 - DNA, 913 bp, Helicobacter pylori
  CDS (86)...(862)
atttcatattttcttttaggggcattctttagagaatgcaattattttctaatctctaagaaatcaatatctaggaattaggaccatgcaagaaagagtttttaaaagaaaagttttagatgcgaatatcttaaaagaaatgcatgcgaacaatgtctgttattccaagcattcaaaagataggtttattcctttcaaatttgataaatttggttatgttggatgtaaactttttaaaaagatattaaactttcctagcaatacaactttctttggtggcacaggttgtaagaaactcatggaacttttaagtgaaatcgttatagattctagaagttctaaaattgcgttaaaccgccattatgccttaactcgcttgcaatggtgcgatagaaccttaagacataatctccaaattttagagagaataggatttctaactgcttttaagaacaaaaaaggttatatttttttgtctatgcatgacttcactaaaatagaaaactacgaacattcaggtttgaatggggagagcaatttacctaatagcttctttttaggaatttgtgggtatttgaaaaaactcttcaagaaattaaaagatagagcattcaggctcgcaaacaagcacggtgtattctttttgaaaattcctaagcattttcaaatgcaaaactttaacaatatttttttggagtttgtgtcggttaataatccttgtttttcttatagattgacttatgatcaacttgttggtaaaaaaattccaaatatcaagtgctcttaccaacaagcaattgtaaaaaagaatatccatagagcattagatgaactatctatagataaggaaattttagcatcataaagaagacaaaggataaaaatgcaattcccactcaaaaaagatttaaga

SEQ ID NO: 338 - protein, 259 aa, Helicobacter pylori
MQERVFKRKVLDANILKEMHANNVCYSKHSKDRFIPFKFDKFGYVGCKLFKKILNFPSNTTFFGGTGCKKLMELLSEIVIDSRSSKIALNRHYALTRLQWCDRTLRHNLQILERIGFLTAFKNKKGYIFLSMHDFTKIENYEHSGLNGESNLPNSFFLGICGYLKKLFKKLKDRAFRLANKHGVFFLKIPKHFQMQNFNNIFLEFVSVNNPCFSYRLTYDQLVGKKIPNIKCSYQQAIVKKNIHRALDELSIDKEILAS

SEQ ID NO: 339 - DNA, 3166 bp, Helicobacter pylori
  CDS (51)...(3113)
actatttgaataatgtcgaatatgaaaaacttcttaaaaagtagcatgcaatggatctagaagaactctatgcgcctaatcacatagagcgtttgaaagcgcggagttttttaagatcgattgctttttttgatgattttagcgcttcttttgaatacagagatctatttagcgttttggaaaatatcgtgcaatttgattatgaaaaaaagccgtataaagatgatttgtattttttgtgcaaatttgtggagccagccctaaaggctatctttagcaatctaaataccaatatctaccgaaaacatttaaaaatgcctttagaaaaggctagggaatttgacgctaaatgcgcgttggatttagccaagcgaccaggtcgtagtttgaaagaaaagttgtgcgacaataaagtattgagcgtcaagcgttatgtgaatgccaatacgcatgaaaacaggtttctcaagcgtttcattaaagaacttttaagaataattcattggcgcgagatagaattccaacaggtttttgaagagttaattttcagcataacaagttttttaaagaatggagtagcccaacaaattgatgaaaaacaagccatcattcctaataacttgttgcattttgataagcactacaaacgcatttttaaagcccatgattggctttatgatggtgtggggtcattgatgaatttggatcaaattttctatttggagtgtttataccaagcccaattttatacttctaaaaacattgaacccacgctaattagaaatgaacaagatttatacgcgctaattaaaaatagttttccaataaaagatttatcgtttgaaaagatgcgtttaaaagcgaaagagttttttgaaaatgaattaagacagcctataaatttagatcaagaaattccgcaattggaattgtgtaagggagtttataaagaaatgtatattgatatgtttagccctgaacctttcgctttgttagtgggtaatggcaatgaagaaaagattttaaagctcccccttttagtcaaaaagcaggagaataatacttatatcaacgctaatggcgctaagggtaagatagatgaaaaaggttatttggccaacgctctcaaaaactatgatgagactcttgtggaagcttttatgagagatttcaaggaacgctataagatagaaaaactatattatttattagatgataatattaaaaattttgaatttgctaagatcaagcataaaataagcttgtattttaaagacgcaaaattctatcctaaaagcgttgctttaggatttagttctttgtttgaaaataaattaaagaaaaatgagcgtttgcgttataacagcgtggatttggtcgttaaagaaaaccataaaagtaagacctttaatgattgtggcttggttttggagaggcaaaaaagcgatgattcaaaagagttccttattctacaagattcttttatcaaaaaagctttaaaaaattttaaaagagccttaggattagaaaaagaaggctttattctgtataaagaatgcttgcctaagctctctatggaagtggttaaagacgggcggtttaaaaattttgagatcattaaagataaaaccattttaggagataaagaaaccctagagattgaaacgccttttattatccctaaagggcgagaaagttttgctttgcccttgatcctaaatgaagaaaaaatcgcctatcaaggtaaaatcacctctaaagattttcccctagaaaatgacgaagaatacaaactcacgctcacttatgacattggcaccgagtttaactatgtgttagagtttaaacctgtcaataatgatttaaagcccattgtcatggaatggcagcgtattgatagggttgaactccctacgcccgattccatcaaaaaaccaagtattgatgaactaaaaaatgactttaatcctaaaaggggcaaaagttctgatttgtttgagtgggcgctagagcaattagagacattgaaagatttaaatagtccacccagatttgttttagagaaaaaactagaatgcggtggaatctcaataataggggaagatagaaacaatgaacttttttacataatggaaacaaatggtaaaaaagttttttgtcatagccgtcaatgcaaagggagcgtgaacaaagatgagctttcattaggcgcgcgagtgtgtttggaagtggggccagataagaacgaccatggtaaatatcgaggtaaaatttatggtttggaaaaaaatagagaaattgttttattaaatacagctaaaaattcttatcaaagaaaacctctagatgagaaaattaaacacagaatagaagcgctcaaaagaatcaagtatccttgtttaaaaattttttcacattacatgcttgaagagttagaaaccttaaatcctgaatttgctactccctttaaagaatatttgaagcggttagaagaatattattttgacccacaaacagacagagattttaaaaaaggactcttggatttctttagccgcttgaatgatagtattcccgcaaaattacaacaagaatttattaatttaccttctacggattttttaagcagatgtttaggctctcttgaaaaagactttcaaaaaacgatttttaagaagcttaaagttactaacctaaagactttaagtattgtggctagggctagttggaataatgagaaatttttagagaacttgatggctcaaaccagcttggagcagcaaaaagactttttgaagcgtatagaagagtgtttgaaaaatcctgagtcattttatttcagtagcgcatgcgaattgctgttagcgtttttgtcttatcgcaacgctaaaagagagttggaattgatccctgaaagcgaaaaaaccatgcgtttattggacagcatagataaagcgatagaaaaagagactgaaattaaaagctttgtaaaattagagctaaaaaatcaaagcttcaacaatatcccacctttgttgtcggcgttacgcttgtatttaaggggggatttggaaggtgttggaattgaaattaatgggacagaagaggatgaataaatcaaacaaattagtcattatcaatcgcgccattccaggtgggggcaaga

SEQ ID NO: 340 - protein, 1021 aa, Helicobacter pylori
MDLEELYAPNHIERLKARSFLRSIAFFDDFSASFEYRDLFSVLENIVQFDYEKKPYKDDLYFLCKFVEPALKAIFSNLNTNIYRKHLKMPLEKAREFDAKCALDLAKRPGRSLKEKLCDNKVLSVKRYVNANTHENRFLKRFIKELLRIIHWREIEFQQVFEELIFSITSFLKNGVAQQIDEKQAIIPNNLLHFDKHYKRIFKAHDWLYDGVGSLMNLDQIFYLECLYQAQFYTSKNIEPTLIRNEQDLYALIKNSFPIKDLSFEKMRLKAKEFFENELRQPINLDQEIPQLELCKGVYKEMYIDMFSPEPFALLVGNGNEEKILKLPLLVKKQENNTYINANGAKGKIDEKGYLANALKNYDETLVEAFMRDFKERYKIEKLYYLLDDNIKNFEFAKIKHKISLYFKDAKFYPKSVALGFSSLFENKLKKNERLRYNSVDLVVKENHKSKTFNDCGLVLERQKSDDSKEFLILQDSFIKKALKNFKRALGLEKEGFILYKECLPKLSMEVVKDGRFKNFEIIKDKTILGDKETLEIETPFIIPKGRESFALPLILNEEKIAYQGKITSKDFPLENDEEYKLTLTYDIGTEFNYVLEFKPVNNDLKPIVMEWQRIDRVELPTPDSIKKPSIDELKNDFNPKRGKSSDLFEWALEQLETLKDLNSPPRFVLEKKLECGGISIIGEDRNNELFYIMETNGKKVFCHSRQCKGSVNKDELSLGARVCLEVGPDKNDHGKYRGKIYGLEKNREIVLLNTAKNSYQRKPLDEKIKHRIEALKRIKYPCLKIFSHYMLEELETLNPEFATPFKEYLKRLEEYYFDPQTDRDFKKGLLDFFSRLNDSIPAKLQQEFINLPSTDFLSRCLGSLEKDFQKTIFKKLKVTNLKTLSIVARASWNNEKFLENLMAQTSLEQQKDFLKRIEECLKNPESFYFSSACELLLAFLSYRNAKRELELIPESEKTMRLLDSIDKAIEKETEIKSFVKLELKNQSFNNIPPLLSALRLYLRGDLEGVGIEINGTEEDE

SEQ ID NO: 341 - DNA, 281 bp, Helicobacter pylori
  CDS (1)...(180)
aacaaaacttttttaaggggtaaaaaccctttagttacaagaaagagaagttttgtcatcaaaatgaagttttttaaagaaaaagaaaaagaagtttcaaaaattaaaagtttgagaaagtttgagtcaaatccgctagtaagatttgaccctagcgctcttgcgctagagccaaaattttagtataatggcgttgcggataccattaaaactatgattactaatctcatgttaggttatctccttttctgaggtaaccacccactattacccccaaccct

SEQ ID NO: 342 - protein, 60 aa, Helicobacter pylori
NKTFLRGKNPLVTRKRSFVIKMKFFKEKEKEVSKIKSLRKFESNPLVRFDPSALALEPKF

SEQ ID NO: 343 - DNA, 745 bp, Helicobacter pylori
  CDS (51)...(692)
gcgcgaattcttcttggacattgattttatagcgcgatttagaaatggccatgcccacaatgaacgctcctaaagacatagaaaacccaaaaaaatggctcaaccctgctgcgctgcaaacaatcactaaaatcgtgcctataaaaatttcaggcaggcgcgtgtcttttgcttgctctaagatgagattagcccctttttttccaggcaataataaaagaactaaaataatccctgctgaaataaaggttttaagaatgagtaaattaacattagaatctttactacctagaatagtgaggattaaaagcatgggaatggctgcaatatcttggaaaatcaaaatccccaccgcgctctttcccatgggcgtgctaagctgtttggaatcttcaaagaatttcagcacaatagcggttgaagagagcgaaagccccatgcctaaaacaagggaaaaaatgggtgaaagacccaaaacaaaataccccaataaaaaagcgattaaagcgcataaaaccacttgtaaaagcccaaaaaccagcacttcttgtttgatggatttgagcttgtcaaaattaaactcaatgcctatcataaacattaaaaagacgataccaaattcgccaatatcagacaacaaatcaaaatcattaattttaaaaaaagccgctaagaccgttcctgtgcaaatgtaaccaatgataacaggcatgtctaatttctttaaaaagattccaaagcccac

SEQ ID NO: 344 - protein, 214 aa, Helicobacter pylori
MPTMNAPKDIENPKKWLNPAALQTITKIVPIKISGRRVSFACSKMRLAPFFPGNNKRTKIIPAEIKVLRMSKLTLESLLPRIVRIKSMGMAAISWKIKIPTALFPMGVLSCLESSKNFSTIAVEESESPMPKTREKMGERPKTKYPNKKAIKAHKTTCKSPKTSTSCLMDLSLSKLNSMPIINIKKTIPNSPISDNKSKSLILKKAAKTVPVQM

SEQ ID NO: 345 - DNA, 601 bp, Helicobacter pylori
  CDS (51)...(491)
gcctttgctcaccctaaagataaaaataaaattcacgaaggttacgcttaatgcgtttagaaaatctaagccagcaaaaaattcttcaactctctggcgggcaagcccaacgagtcgctttagcaagagctttaatcgcagccaagaatctattgcttttagatgagcctttaaacgccttagataacgccttaaaaaacgaagtgcaacaaggtttgcttgattttatcaagcgtgaaaatttaagcgtgttattggtaagccataaccccaatgaaatcaccaagctcgcgcaaactttcctctttttaaacaatggcgttattgatcctaatcaagaaaatcggcttttttcaaaccgcttattaataaaacctctctttgaagatgaaaattattgccattatgaggtcatttctcaaacgattagtttgcccaaagattgtctgaacccaacttttaagcttgatttcaatcaaaacaaaaaattttagaaatattttttcattttcctcttaaaaccctcttatttttcaaaaggagttgcttaacaaccgctaaaatcaaactcttttattttaatacccaatgaaaacagagc

SEQ ID NO: 346 - protein, 147 aa, Helicobacter pylori
MRLENLSQQKILQLSGGQAQRVALARALIAAKNLLLLDEPLNALDNALKNEVQQGLLDFIKRENLSVLLVSHNPNEITKLAQTFLFLNNGVIDPNQENRLFSNRLLIKPLFEDENYCHYEVISQTISLPKDCLNPTFKLDFNQNKKF

SEQ ID NO: 347 - DNA, 1530 bp, Helicobacter pylori
  CDS (52)...(1440)
ttaagccatttttgaatacaataagagtattttatttttaaggttagaacaatgagtttgatcgttacgcgcttcgctccatcgcccactggctacctccacataggaggcttaagaacagccattttcaattatctttttgcacgagccaatcaaggaaaattttttttacgcattgaagacacggatttgagccgtaactctatagaagcggctaacgccattatagaagctttcaaatgggtagggctagaatacgatggcgaaatcctctaccaatccaaacgctttgagatttataaagaatacattcaaaaactcttagatgaagacaaagcctattattgttacatgagcaaagaagagttggacgctttgagagaagagcaaaaagccaggaaagaaaccccacgctatgacaatcgctatcgtgattttaaaggcacgcctcctaaaggcatagagcctgtggtaaggattaaagtcccccaaaatgaggtgattggttttaatgacggggttaaaggcgaagtgaaagtgaatactaacgaattagacgattttattatcgccaggagcgatgggacacccacttataactttgtggttactattgatgacgctttaatggggattactgatgtgattagaggcgatgatcacctttctaacacccctaaacaaatcgttctttataaggctttgaattttaaaatccctaattttttccatgtgccgatgattttgaatgaagaagggcaaaaattaagcaaacgccatggggccactaatgtgatggactatcaagaaatgggctatcttaaggaagctttagtgaattttttagcgcgtttggggtggagctatcaggataaagaggtttttagcatgcaagaattgctagaattatttgatcctaaagatttgaattcttcgcccagttgcttcagctggcacaagcttaattggctcaacgctcattatttaaaaaaccaaagtgtgcaagaattgttaaaacttttaaagccttttagttttagcgatctctcgcatttaaaccccactcaattggatcgcttgttagacgctctcaaagaaagatctcaaacactaaaagaattagcccttaaaatagatgaggttttaatcgcccctgtggagtatgaagaaaaggtttttaaaaaactcaatcaagcgctcgttatgcccttgttagaaaagtttaagctagaattaaacaaagccaatttcaacgatgaaagcgcgctagaaaacgccatgcgccaaatcattgaagaagaaaagattaaagcgggtagttttatgcagcctttaagattggcccttttgggtaagggaggcgggataggccttaaagaagcgctttttattttaggcaaaacagagagcgtcaaaagaatagaggattttttgaaaaactaaaaaattggctctgttttcattgggtattaaaataaaagagtttgattttagcggttgttaagcaactccttttgaaaaataagaggg

SEQ ID NO: 348 - protein, 463 aa, Helicobacter pylori
MSLIVTRFAPSPTGYLHIGGLRTAIFNYLFARANQGKFFLRIEDTDLSRNSIEAANAIIEAFKWVGLEYDGEILYQSKRFEIYKEYIQKLLDEDKAYYCYMSKEELDALREEQKARKETPRYDNRYRDFKGTPPKGIEPVVRIKVPQNEVIGFNDGVKGEVKVNTNELDDFIIARSDGTPTYNFVVTIDDALMGITDVIRGDDHLSNTPKQIVLYKALNFKIPNFFHVPMILNEEGQKLSKRHGATNVMDYQEMGYLKEALVNFLARLGWSYQDKEVFSMQELLELFDPKDLNSSPSCFSWHKLNWLNAHYLKNQSVQELLKLLKPFSFSDLSHLNPTQLDRLLDALKERSQTLKELALKIDEVLIAPVEYEEKVFKKLNQALVMPLLEKFKLELNKANFNDESALENAMRQIIEEEKIKAGSFMQPLRLALLGKGGGIGLKEALFILGKTESVKRIEDFLKN

SEQ ID NO: 349 - DNA, 382 bp, Helicobacter pylori
  CDS (51)...(329)
cctaatgattttttctatcttgccccccttatgtgttagaaaattctaaaatgtttaaggggatttatcctatgcgtaattttcctatccaccataatggttttaaacatgaagtgttagctcacatgctaaaaaggcataaagagccatttattttaagctataatgactgcgaatttgtaaggaatgcttataaagattttaaaattttagaaccatcttggcaatacactatgggacaaggcgagatcagaatgggtaaaaatcgcttagaaagaggcgataataaccatgtcaaacaatctcatgagttattgattatcaaggagtaaaaatgcatattagcgaagtcaaaactgcctttaaaatcgctgatgtagaa

SEQ ID NO: 350 - protein, 93 aa, Helicobacter pylori
MFKGIYPMRNFPIHHNGFKHEVLAHMLKRHKEPFILSYNDCEFVRNAYKDFKILEPSWQYTMGQGEIRMGKNRLERGDNNHVKQSHELLIIKE

SEQ ID NO: 351 - DNA, 376 bp, Helicobacter pylori
  CDS (183)...(323)
atccacaaattccacttcattttctttgcaaaattcaaaaaattctttgatcttgctttcactattttgagttcttactatcattaaccacctttaattgttatgaattgagtttgattgataggggtgattatagcatttatggggcaaaaaaagtagaatctgtatcaagttttattaagatgcatgcggtaaaatccgctaaatcaaggagtgttattatggaagcagacgcaaccacactattaggattttttgaagaaaatcaaaacaatcaatttgtcattcctatctatcagaggttgtatagttggaaaaaggaataatgcgaacaattatgggatgatattataaaaattggtgggaatgataagat

SEQ ID NO: 352 - protein, 47 aa, Helicobacter pylori
MHAVKSAKSRSVIMEADATTLLGFFEENQNNQFVIPIYQRLYSWKKE

SEQ ID NO: 353 - DNA, 1021 bp, Helicobacter pylori
  CDS (51)...(968)
tattaatggggtttgtgggattgaatgctagtgatcgtttgttagaaatcatgcgcctttatcaaaaacaaggcttggaaatggtgggtcaaaagttggattcttatttagcggataaatctttttgggcagaagaacttcaaaacaaggacacggattttggctattatcaaaacaagcagtttttatttgtggctaataaatccaagcccagtttggagttttatgagatagaaaataacatgcttaaaaaaatcaacagctctaaagctcttgtaggctctaaaaagggcgataagactttagagggcgatttggccacgcctattggagtgtatcgtatcacgcagaaattagagcgcttggatcaatattatggcgttttggcttttgtaacgaattaccctaatttgtatgataccttgaaaaaacgcaccgggcatggcatttgggtgcatggaatgcctttaaatggcgatcggaatgaattgaacaccaagggctgtattgcgattgaaaacccgcttttaagctcttatgacaaagtgttaaaaggcgaaaaagcgttcctcatcacctatgaagacaagtttttcccaagcaccaaagaagaattgagcatgattttaagctccctttttcaatggaaagaagcctgggctaggggcgattttgaacgctacatgcgtttttataaccccaatttcactcgctatgacggcatgaaatttaacgcttttaaagagtataaaaaaagggtgtttgcaaaaaacgaaaaaaagaatatcgctttttcctctatcaatgtgatcccttaccccaactctcagaacaaacgcttgttttatgtggtgtttgaccaagattataaagcctaccagcataacaagctctcttatagctccaattctcaaaaagaactctatatagagattgaaaacaatcaagtgtctattataatggaaaaataagaaaaatagggctttgttttaattaggataatctaagcggatttttctaa

SEQ ID NO: 354 - protein, 306 aa, Helicobacter pylori
MRLYQKQGLEMVGQKLDSYLADKSFWAEELQNKDTDFGYYQNKQFLFVANKSKPSLEFYEIENNMLKKINSSKALVGSKKGDKTLEGDLATPIGVYRITQKLERLDQYYGVLAFVTNYPNLYDTLKKRTGHGIWVHGMPLNGDRNELNTKGCIAIENPLLSSYDKVLKGEKAFLITYEDKFFPSTKEELSMILSSLFQWKEAWARGDFERYMRFYNPNFTRYDGMKFNAFKEYKKRVFAKNEKKNIAFSSINVIPYPNSQNKRLFYVVFDQDYKAYQHNKLSYSSNSQKELYIEIENNQVSIIMEK

SEQ ID NO: 355 - DNA, 990 bp, Helicobacter pylori
  CDS (43)...(870)
aaaacaagctaaagaatggctcaaattgtaaaaggatctgacatgtttaaagatttttatcgcaccaccctctcttttttaaagcctttattgcttttactagttttattattgccgttttcactttgtatagctgatgaatatattagcataagtgatgattgggatgaaattgtgcgaaatcataagacatattattttgaaaatggtttagaccattttaatcaaggccaataccagcaagcctttaaagattttagattggcgcaagaatacagcatcgggcttggcagtgtttatttagccaaaatgtatttggagggaaagggcgtgaaagtggattacaaaaaagcacaattttatgcagaaaacgctatcaaagggtatgggagcggattgttagggggtgctcttattttaggacgcatgcaagcagaaggcttagggatgaaaaaggatttgaaacaagcgctcaagacttataggcatgtggttcgcatgttttctaataaaagcacaaattttgctaacaattttagattaccaaaccttgcggaatttactagtatgcttattggatcgcgattcattgatctttcaggtttgagcgcgaatcctataaaatttggaaagaaatttggaatacttgttaagaaatccactcaaatcaaagataagacacttctttgggaagatattgctgaaatttcaagcaatattactttactcaaacaacaaatgggggagatcctttataggattgggatcgcttataaagaagggcttggcactagaaagaaaaaggacagggctaaaaaattcctgcaaaaatccgcagaatttggctatgaaaaagccatggaagctctgtagttttttaatcaaacttgtatcaagcttgactgaatgggttagaaaaatccgcttagattatcctaattaaaacaaagccctatttttcttatttttccattataatagacacttgat

SEQ ID NO: 356 - protein, 276 aa, Helicobacter pylori
MFKDFYRTTLSFLKPLLLLLVLLLPFSLCIADEYISISDDWDEIVRNHKTYYFENGLDHFNQGQYQQAFKDFRLAQEYSIGLGSVYLAKMYLEGKGVKVDYKKAQFYAENAIKGYGSGLLGGALILGRMQAEGLGMKKDLKQALKTYRHVVRMFSNKSTNFANNFRLPNLAEFTSMLIGSRFIDLSGLSANPIKFGKKFGILVKKSTQIKDKTLLWEDIAEISSNITLLKQQMGEILYRIGIAYKEGLGTRKKKDRAKKFLQKSAEFGYEKAMEAL

SEQ ID NO: 357 - DNA, 2685 bp, Helicobacter pylori
  CDS (1)...(2601)
ttggattgcgtatctcaagccaaaactgaagctgagaaaaaagaatgcgagaaattactcacccctgaagcgagaaaactcttagaagaagctaaagagagcgttaaagcttataaagactgcgtatcaaaagctaggaatgaaaaagagaaaaaagaatgcgagaaattactcacgcctgaagcgaaaaaacttttagagcaacaagtgctagattgtttgaaaaacgctaaaaccgaagctgataaaaaaaggtgtgtcaaagatctccctaaagacttgcagaaaaaggttttagctaaagagagcgttaaggcttatttggactgcgtatcaagagctaggaatgaaaaagagaaaaaagaatgcgagaaattgctcacccctgaagcgaaaaaacttttagaagaagccaaagagagtcttaaagcttataaagactgcctctctcaagctagaaatgaagaagaaaggagagcttgcgagaaactactcacgcctgaagcgagaaaactcttagagcaagaagttaagaaaagcattaaggcttatttggactgcgtatcaagagctaggaatgaaaaagagaaaaaagaatgcgagaaattactcacgcctgaagcgagaaaatttttagcgaagcaagtgctaaattgtttggaaaaagctggaaatgaagaagaaagaaaagcatgtcttaaaaatctccctaaagacttacaggaaaatattttagctaaagagagtcttaaagcttataaagactgcctctctcaagctagaaatgaagaagaaaggagagcttgcgagaaactactcacgcctgaagcgagaaaactcttagagcaagaagttaagaaaagcgttaaggcttatttggactgcgtatcaagagctaggaatgaaaaagagaaaaaagaatgcgagaaattactcacgcctgaagcgagaaaatttttagcgaaagaactccaacaaaaagataaagcgatcaaagattgcttgaaaaacgccgatcctaacgacagagcggctatcatgaagtgtttggatggtttgagcgatgaagagaagctcaaatacctgcaagaagctagagaaaaggctgttgcggattgtttggctatggctaaaaccgatgaagaaaaaaggaaatgccaaaacctttatagcgatttgatccaagaaatccaaaataaaaggacacaaaacaaacaaaatcaattgagtaaaacagaaaggttgcatcaagcaagcgagtgcttggataacttagatgaccctactgatcaagaggccatagagcaatgtttagagggcttgagcgatagtgaaagggcgctaattctaggaattaaacgacaagctgatgaagtggatctgatttatagcgatctaagaaaccgtaaaacctttgataacatggcggctaaaggttatccattgttaccaatggatttcaaaaatggcggcgatattgccactattaacgccactaatgttgatgcggacaaaatagctagcgataatcctatttatgcttccatagagcctgatattgccaagcaatacgaaacagaaaaaaccattaaggataagaatttagaagctaaattagctaaggctttaggtggcaataaaaaagatgacgataaagaaaaaagtaaaaaatccacagcagaagctaaagcagaaaacaataagatagacaaagatgtcgcagaaactgccaagaatatcagtgaaatcgctcttaagaacaaaaaagaaaagagtggggaatttgtagatgaaaatggtaatcccattgatgacaaaaagaaagcagaaaaacaagatgaaacaagccctgtcaaacaggcctttataggcaagagtgatcccacatttgttttagcgcaatacacccccattgaaatcactctgacttctaaagtagatgccactctcacaggtatagtgagtggggttgtagccaaagatgtatggaacatgaacggcactatgatcttattagacaaaggcactaaggtgtatgggaattatcaaagcgtgaaaggtggcacacccattatgacacgcttaatgatagtctttactaaagccattacgcctgatggtgtgataatacctctagcaaacgctcaagcagcaggcatgttgggtgaagcaggggtagatggctatgtgaataatcactttatgaagcgcataggctttgctgtgatagcaagcgtggttaatagcttcttgcaaactgcgcctatcatagctctagataaactcataggccttggcaaaggtagaagtgaaaggacacctgaatttaattacgctttgggtcaagctatcaatggtagcatgcaaagttcagctcagatgtctaatcaaattctagggcaactgatgaatatccccccaagtttttacaaaaacgagggcgatagtattaagattctcacaatggacgatattgattttagcggtgtgtatgatgttaaaattactaacaaatctgtggtagatgaaattatcaaacaaagcaccaaaactttgtctagagaacatgaagaaatcaccacaagccccaaaggtggcaattaattcaagagaaaggataaaatatattcatgttactaaactcggttctttacaaaataaaagacaaaaccaacaacaggctct

SEQ ID NO: 358 - protein, 867 aa, Helicobacter pylori
LDCVSQAKTEAEKKECEKLLTPEARKLLEEAKESVKAYKDCVSKARNEKEKKECEKLLTPEAKKLLEQQVLDCLKNAKTEADKKRCVKDLPKDLQKKVLAKESVKAYLDCVSRARNEKEKKECEKLLTPEAKKLLEEAKESLKAYKDCLSQARNEEERRACEKLLTPEARKLLEQEVKKSIKAYLDCVSRARNEKEKKECEKLLTPEARKFLAKQVLNCLEKAGNEEERKACLKNLPKDLQENILAKESLKAYKDCLSQARNEEERRACEKLLTPEARKLLEQEVKKSVKAYLDCVSRARNEKEKKECEKLLTPEARKFLAKELQQKDKAIKDCLKNADPNDRAAIMKCLDGLSDEEKLKYLQEAREKAVADCLAMAKTDEEKRKCQNLYSDLIQEIQNKRTQNKQNQLSKTERLHQASECLDNLDDPTDQEAIEQCLEGLSDSERALILGIKRQADEVDLIYSDLRNRKTFDNMAAKGYPLLPMDFKNGGDIATINATNVDADKIASDNPIYASIEPDIAKQYETEKTIKDKNLEAKLAKALGGNKKDDDKEKSKKSTAEAKAENNKIDKDVAETAKNISEIALKNKKEKSGEFVDENGNPIDDKKKAEKQDETSPVKQAFIGKSDPTFVLAQYTPIEITLTSKVDATLTGIVSGVVAKDVWNMNGTMILLDKGTKVYGNYQSVKGGTPIMTRLMIVFTKAITPDGVIIPLANAQAAGMLGEAGVDGYVNNHFMKRIGFAVIASVVNSFLQTAPIIALDKLIGLGKGRSERTPEFNYALGQAINGSMQSSAQMSNQILGQLMNIPPSFYKNEGDSIKILTMDDIDFSGVYDVKITNKSVVDEIIKQSTKTLSREHEEITTSPKGGN

SEQ ID NO: 359 - DNA, 877 bp, Helicobacter pylori
  CDS (65)...(688)
tttggtggcactaatggtgttgtgattttcaaaaaagcctagttttacaaagttaggattttgaatggccgtttatttagattttgaaaatcatattaaagagattcaaaatgaaattgaattagcccttattagaggcgatgaggacgctaaagaaatcttagaaaaaagattggataaggaggttaaaagcatttattccaatctcactgattttcaaaaactccaattagcaagacaccctgacagaccctacgctatggattacattgatctcatcttaaaagataaatatgaagtctttggggataggcattataacgatgataaagcgatcgtgtgctttgtagggaaaattgataatgtcccagttgtggtgatcggagaagaaaagggcagagggactaaaaacaaactcttaagaaattttggcatgcctaacccttgtggctatcgtaaggctttgaaaatggcaaagtttgctgaaaagtttaatttgcctattttaatgcttgtggatacagccggggcgtatccggggattggtgcagaagaaagggggcaaagtgaagcgatcgctaaaaatctccaagagttcgcctctttaaaagtccctactatttctgtaattatcggtgaggggggcagtggtggtgcgctacgattgcagtggctgacaaattggctatgatggaatattccatttttagcgttatatccccagaaggttgtgcggcgattctttgggatgaccctagcaagactgaagtggctattaaagcgatgaaaatcacgcctagagacttaaaggaggcggggcttattgatgatattatcttagagcctagcaaaggggctcatagagacaaattttcag

SEQ ID NO: 360 - protein, 208 aa, Helicobacter pylori
MAVYLDFENHIKEIQNEIELALIRGDEDAKEILEKRLDKEVKSIYSNLTDFQKLQLARHPDRPYAMDYIDLILKDKYEVFGDRHYNDDKAIVCFVGKIDNVPVVVIGEEKGRGTKNKLLRNFGMPNPCGYRKALKMAKFAEKFNLPILMLVDTAGAYPGIGAEERGQSEAIAKNLQEFASLKVPTISVIIGEGGSGGALRLQWLTNWL

SEQ ID NO: 361 - DNA, 804 bp, Helicobacter pylori
  CDS (67)...(744)
  misc_feature 738: n = A,T,C or G
aaggcgttatgagtcaagactataatagactttaagaaaaatttaaaaattaaggattattgaataatgcaattcacagggaaaaatgttctcattactggggcttctaaaggcattggggctgaaatcgccaaaactctcgcttctatggggctgaaagtttggatcaattaccgcagtaatgctgaagtggctgacgctttgaaaaatgagcttgaagaaaaaggctataaggcagctgtcattaaatttgatgcggcttctgaaagcgattttattgaagcgatacaaaccatcgtccaaagcgatggggggttgtcttacttggtgaataacgccggtgtggtgcgcgataaattagcgatcaaaatgaaaacagaagactttcaccatgtcatagacaataacctcacttcagcctttataggttgccgagaggctttaaaggtgatgagcaagagtcgttttgggagcgtggtcaatgtcgcttctatcattggtgaaagaggcaatatggggcagacaaactactcagcgagtaaggggggaatgattgcaatgagcaagtcctttgcttatgagggagctttaaggaatattcgtttcaactctgtaacgcccggttttatagaaaccgacatgaacgccaatttgaaagacgaactcaaagcggattatgttaaaaacattcctttaaacaggctagggtctgctaaggaagtggcagaagcggtaggnttcttttgagtgatcactctagttacatcactggagagactctcaaagtcaatggcgggctttata

SEQ ID NO: 362 - protein, 226 aa, Helicobacter pylori
  VARIANT 224: Xaa = Any Amino Acid
MQFTGKNVLITGASKGIGAEIAKTLASMGLKVWINYRSNAEVADALKNELEEKGYKAAVIKFDAASESDFIEAIQTIVQSDGGLSYLVNNAGVVRDKLAIKMKTEDFHHVIDNNLTSAFIGCREALKVMSKSRFGSVVNVASIIGERGNMGQTNYSASKGGMIAMSKSFAYEGALRNIRFNSVTPGFIETDMNANLKDELKADYVKNIPLNRLGSAKEVAEAVXFF

SEQ ID NO: 363 - DNA, 373 bp, Helicobacter pylori
  CDS (103)...(312)
gaaaattcttgacacccagttaattcgtcttatataatactatttcatttgtagccattgttaagcaatgattttaagctatggaaaagaggtgatagcagtatgccagggattaaggttagagaaggcgatgcgtttgatgaagcttataggagattcaaaaagcaaaccgatcgcaatttagtggtaacagaatgccgtgctagaaggttctttgagtctaagactgaaaaacgcaaaaaacaaaaaatcagcgctaaaaagaaggttttgaagcgtctttatatgttaaggcgttatgagtcaagactataatagactttaagaaaaatttaaaaattaaggattattgaataatgcaattcacagggaa

SEQ ID NO: 364 - protein, 70 aa, Helicobacter pylori
MPGIKVREGDAFDEAYRRFKKQTDRNLVVTECRARRFFESKTEKRKKQKISAKKKVLKRLYMLRRYESRL

SEQ ID NO: 365 - DNA, 23 bp, Helicobacter pylori
ccgaattcggttataaagcccct

SEQ ID NO: 366 - DNA, 24 bp, Helicobacter pylori
ccgctcgagttaaggctgatttaa

SEQ ID NO: 367 - DNA, 32 bp, Helicobacter pylori
cgcggatccgaggaaatagcatgttaataacc

SEQ ID NO: 368 - DNA, 33 bp, Helicobacter pylori
ccgctcgagtcactgcttgcatgacttattcca

What is claimed is:

1. An isolated polynucleotide that encodes:
(i) a polypeptide comprising an amino acid sequence that is homologous to the amino acid sequence of a Helicobacter polypeptide selected from the group consisting of GHPO 15 (SEQ ID NO:2), GHPO 16 (SEQ ID NO:4), GHPO 36 (SEQ ID NO:6), GHPO 38 (SEQ ID NO:8), GHPO 52 (SEQ ID NO:10), GHPO 57 (SEQ ID NO:12), GHPO 64 (SEQ ID NO:14), GHPO 79 (SEQ ID NO:16), GHPO 84 (SEQ ID NO:18), GHPO 86 (SEQ ID NO:20), GHPO 99 (SEQ ID NO:22), GHPO 106 (SEQ ID NO:24), GHPO 118 (SEQ ID NO:26), GHPO 122 (SEQ ID NO:28), GHPO 128 (SEQ ID NO:30), GHPO 138 (SEQ ID NO:32), GHPO 153 (SEQ ID NO:34), GHPO 160 (SEQ ID NO:36), GHPO 168 (SEQ ID NO:38), GHPO 179 (SEQ ID NO:40), GHPO 189 (SEQ ID NO:42), GHPO 229 (SEQ ID NO:44), GHPO 243 (SEQ ID NO:46), GHPO 244 (SEQ ID NO:48), GHPO 251 (SEQ ID NO:50), GHPO 267 (SEQ ID NO:52), GHPO 269 (SEQ ID NO:54), GHPO 279 (SEQ ID NO:56), GHPO 284 (SEQ ID NO:58), GHPO 296 (SEQ ID NO:60), GHPO 300 (SEQ ID NO:62), GHPO 305 (SEQ ID NO:64), GHPO 319 (SEQ ID NO:66), GHPO 330 (SEQ ID NO:68), GHPO 340 (SEQ ID NO:70), GHPO 342 (SEQ ID NO:72), GHPO 344 (SEQ ID NO:74), GHPO 358 (SEQ ID NO:76), GHPO 373 (SEQ ID NO:78), GHPO 382 (SEQ ID NO:80), GHPO 384 (SEQ ID NO:82), GHPO 398 (SEQ ID NO:84), GHPO 409 (SEQ ID NO:86), GHPO 422 (SEQ ID NO:88), GHPO 430 (SEQ ID NO:90), GHPO 446 (SEQ ID NO:92), GHPO 447 (SEQ ID NO:94), GHPO 450 (SEQ ID NO:96), GHPO 451 (SEQ ID NO:98), GHPO 452 (SEQ ID NO:100), GHPO 456 (SEQ ID NO:102), GHPO 461 (SEQ ID NO:104), GHPO 476 (SEQ ID NO:106), GHPO 478 (SEQ ID NO:108), GHPO 491 (SEQ ID NO:110), GHPO 511 (SEQ ID NO:112), GHPO 519 (SEQ ID NO:114), GHPO 526 (SEQ ID NO:116), GHPO 534 (SEQ ID NO:118), GHPO 536 (SEQ ID NO:120), GHPO 542 (SEQ ID NO:122), GHPO 544 (SEQ ID NO:124), GHPO 576 (SEQ ID NO:126), GHPO 578 (SEQ ID NO:128), GHPO 580 (SEQ ID NO:130), GHPO 585 (SEQ ID NO:132), GHPO 599 (SEQ ID NO:134), GHPO 639 (SEQ ID NO:136), GHPO 642 (SEQ ID NO:138), GHPO 647 (SEQ ID NO:140), GHPO 654 (SEQ ID NO:142), GHPO 669 (SEQ ID NO:144), GHPO 710 (SEQ ID NO:146), GHPO 713 (SEQ ID NO:148), GHPO 716 (SEQ ID NO:150), GHPO 718 (SEQ ID NO:152), GHPO 726 (SEQ ID NO:154), GHPO 734 (SEQ ID NO:156), GHPO 740 (SEQ ID NO:158), GHPO 770 (SEQ ID NO:160), GHPO 782 (SEQ ID NO:162), GHPO 786 (SEQ ID NO:164), GHPO 792 (SEQ ID NO:166), GHPO 797 (SEQ ID NO:168), GHPO 816 (SEQ ID NO:170), GHPO 828 (SEQ ID NO:172), GHPO 839 (SEQ ID NO:174), GHPO 840 (SEQ ID NO:176), GHPO 842 (SEQ ID NO:178), GHPO 885 (SEQ ID NO:180), GHPO 889 (SEQ ID NO:182), GHPO 903 (SEQ ID NO:184), GHPO 912 (SEQ ID NO:186), GHPO 946 (SEQ ID NO:188), GHPO 958 (SEQ ID NO:190), GHPO 968 (SEQ ID NO:192), GHPO 987 (SEQ ID NO:194), GHPO 992 (SEQ ID NO:196), GHPO 996 (SEQ ID NO:198), GHPO 997 (SEQ ID NO:200), GHPO 1002 (SEQ ID NO:202), GHPO 1026 (SEQ ID NO:204), GHPO 1028 (SEQ ID NO:206), GHPO 1034 (SEQ ID NO:208), GHPO 1038 (SEQ ID NO:210), GHPO 1059 (SEQ ID NO:212), GHPO 1065 (SEQ ID NO:214), GHPO 1072 (SEQ ID NO:216), GHPO 1073 (SEQ ID NO:218), GHPO 1088 (SEQ ID NO:220), GHPO 1091 (SEQ ID NO:222), GHPO 1105 (SEQ ID NO:224), GHPO 1115 (SEQ ID NO:226), GHPO 1159 (SEQ ID NO:228), GHPO 1177 (SEQ ID NO:230), GHPO 1187 (SEQ ID NO:232), GHPO 1192 (SEQ ID NO:234), GHPO 1195 (SEQ ID NO:236), GHPO 1224 (SEQ ID NO:238), GHPO 1225 (SEQ ID NO:240), GHPO 1228 (SEQ ID NO:242), GHPO 1229 (SEQ ID NO:244), GHPO 1231 (SEQ ID NO:246), GHPO 1236 (SEQ ID NO:248), GHPO 1242 (SEQ ID NO:250), GHPO 1248 (SEQ ID NO:252), GHPO 1270 (SEQ ID NO:254), GHPO 1271 (SEQ ID NO:256), GHPO 1298 (SEQ ID NO:258), GHPO 1301 (SEQ ID NO:260), GHPO 1304 (SEQ ID NO:262), GHPO 1315 (SEQ ID NO:264), GHPO 1319 (SEQ ID NO:266), GHPO 1323 (SEQ ID NO:268), GHPO 1331 (SEQ ID NO:270), GHPO 1332 (SEQ ID NO:272), GHPO 1347 (SEQ ID NO:274), GHPO 1373 (SEQ ID NO:276), GHPO 1376 (SEQ ID NO:278), GHPO 1380 (SEQ ID NO:280), GHPO 1394 (SEQ ID NO:282), GHPO 1407 (SEQ ID NO:284), GHPO 1415 (SEQ ID NO:286), GHPO 1425 (SEQ ID NO:288), GHPO 1427 (SEQ ID NO:290), GHPO 1444 (SEQ ID NO:292), GHPO 1449 (SEQ ID NO:294), GHPO 1465 (SEQ ID NO:296), GHPO 1475 (SEQ ID NO:298), GHPO 1479 (SEQ ID NO:300), GHPO 1483 (SEQ ID NO:302), GHPO 1488 (SEQ ID NO:304), GHPO 1496 (SEQ ID NO:306), GHPO 1524 (SEQ ID NO:308), GHPO 1536 (SEQ ID NO:310), GHPO 1539 (SEQ ID NO:312), GHPO 1540 (SEQ ID NO:314), GHPO 1542 (SEQ ID NO:316), GHPO 1555 (SEQ ID NO:318), GHPO 1560 (SEQ ID NO:320), GHPO 1564 (SEQ ID NO:322), GHPO 1570 (SEQ ID NO:324), GHPO 1588 (SEQ ID NO:326), GHPO 1604 (SEQ ID NO:328), GHPO 1605 (SEQ ID NO:330), GHPO 1619 (SEQ ID NO:332), GHPO 1629 (SEQ ID NO:334), GHPO 1642 (SEQ ID NO:336), GHPO 1654 (SEQ ID NO:338), GHPO 1661 (SEQ ID NO:340), GHPO 1673 (SEQ ID NO:342), GHPO 1687 (SEQ ID NO:344), GHPO 1692 (SEQ ID NO:346), GHPO 1693 (SEQ ID NO:348), GHPO 1699 (SEQ ID NO:350), GHPO 1738 (SEQ ID NO:352), GHPO 1745 (SEQ ID NO:354), GHPO 1746 (SEQ ID NO:356), GHPO 1754 (SEQ ID NO:358), GHPO 1792 (SEQ ID NO:360), GHPO 1795 (SEQ ID NO:362), and GHPO 1796 (SEQ ID NO:364); or
(ii) a derivative of said Helicobacter polypeptide.

2. The isolated polynucleotide of claim 1, which encodes a mature form of said Helicobacter polypeptide.

3. The isolated polynucleotide of claim 1, wherein the polynucleotide is a DNA molecule.

4. The isolated polynucleotide of claim 1, which is a DNA molecule that can be amplified by polymerase chain reaction from a Helicobacter genome.

5. The isolated DNA molecule of claim 4, which can be amplified by the polymerase chain reaction from a Helicobacter pylori genome.

6. The isolated polynucleotide of claim 1, which is a DNA molecule that encodes the mature form or a derivative of a polypeptide encoded by the DNA molecule of claim 4.

7. The isolated polynucleotide of claim 1, which is a DNA molecule that encodes the mature form or a derivative of a polypeptide encoded by the DNA molecule of claim 5.

8. A compound, in a substantially purified form, that is the mature form or a derivative of a polypeptide comprising an amino acid sequence that is homologous to a Helicobacter polypeptide selected from the group consisting of GHPO 15 (SEQ ID NO:2), GHPO 16 (SEQ ID NO:4), GHPO 36 (SEQ ID NO:6), GHPO 38 (SEQ ID NO:8), GHPO 52 (SEQ ID NO:10), GHPO 57 (SEQ ID NO:12), GHPO 64 (SEQ ID NO:14), GHPO 79 (SEQ ID NO:16), GHPO 84 (SEQ ID NO:18), GHPO 86 (SEQ ID NO:20), GHPO 99 (SEQ ID NO:22), GHPO 106 (SEQ ID NO:24), GHPO 118 (SEQ ID NO:26), GHPO 122 (SEQ ID NO:28), GHPO 128 (SEQ ID NO:30), GHPO 138 (SEQ ID NO:32), GHPO 153 (SEQ ID NO:34), GHPO 160 (SEQ ID NO:36), GHPO 168 (SEQ ID NO:38), GHPO 179 (SEQ ID NO:40), GHPO 189 (SEQ ID NO:42), GHPO 229 (SEQ ID NO:44), GHPO 243 (SEQ ID NO:46), GHPO 244 (SEQ ID NO:48), GHPO 251 (SEQ ID NO:50), GHPO 267 (SEQ ID NO:52), GHPO 269 (SEQ ID NO:54), GHPO 279 (SEQ ID NO:56), GHPO 284 (SEQ ID NO:58), GHPO 296 (SEQ ID NO:60), GHPO 300 (SEQ ID NO:62), GHPO 305 (SEQ ID NO:64), GHPO 319 (SEQ ID NO:66), GHPO 330 (SEQ ID NO:68), GHPO 340 (SEQ ID NO:70), GHPO 342 (SEQ ID NO:72), GHPO 344 (SEQ ID NO:74), GHPO 358 (SEQ ID NO:76), GHPO 373 (SEQ ID NO:78), GHPO 382 (SEQ ID NO:80), GHPO 384 (SEQ ID NO:82), GHPO 398 (SEQ ID NO:84), GHPO 409 (SEQ ID NO:86), GHPO 422 (SEQ ID NO:88), GHPO 430 (SEQ ID NO:90), GHPO 446 (SEQ ID NO:92), GHPO 447 (SEQ ID NO:94), GHPO 450 (SEQ ID NO:96), GHPO 451 (SEQ ID NO:98), GHPO 452 (SEQ ID NO:100), GHPO 456 (SEQ ID NO:102), GHPO 461 (SEQ ID NO:104), GHPO 476 (SEQ ID NO:106), GHPO 478 (SEQ ID NO:108), GHPO 491 (SEQ ID NO:110), GHPO 511 (SEQ ID NO:112), GHPO 519 (SEQ ID NO:114), GHPO 526 (SEQ ID NO:116), GHPO 534 (SEQ ID NO:118), GHPO 536 (SEQ ID NO:120), GHPO 542 (SEQ ID NO:122), GHPO 544 (SEQ ID NO:124), GHPO 576 (SEQ ID NO:126), GHPO 578 (SEQ ID NO:128), GHPO 580 (SEQ ID NO:130), GHPO 585 (SEQ ID NO:132), GHPO 599 (SEQ ID NO:134), GHPO 639 (SEQ ID NO:136), GHPO 642 (SEQ ID NO:138), GHPO 647 (SEQ ID NO:140), GHPO 654 (SEQ ID NO:142), GHPO 669 (SEQ ID NO:144), GHPO 710 (SEQ ID NO:146), GHPO 713 (SEQ ID NO:148), GHPO 716 (SEQ ID NO:150), GHPO 718 (SEQ ID NO:152), GHPO 726 (SEQ ID NO:154), GHPO 734 (SEQ ID NO:156), GHPO 740 (SEQ ID NO:158), GHPO 770 (SEQ ID NO:160), GHPO 782 (SEQ ID NO:162), GHPO 786 (SEQ ID NO:164), GHPO 792 (SEQ ID NO:166), GHPO 797 (SEQ ID NO:168), GHPO 816 (SEQ ID NO:170), GHPO 828 (SEQ ID NO:172), GHPO 839 (SEQ ID NO:174), GHPO 840 (SEQ ID NO:176), GHPO 842 (SEQ ID NO:178), GHPO 885 (SEQ ID NO:180), GHPO 889 (SEQ ID NO:182), GHPO 903 (SEQ ID NO:184), GHPO 912 (SEQ ID NO:186), GHPO 946 (SEQ ID NO:188), GHPO 958 (SEQ ID NO:190), GHPO 968 (SEQ ID NO:192), GHPO 987 (SEQ ID NO:194), GHPO 992 (SEQ ID NO:196), GHPO 996 (SEQ ID NO:198), GHPO 997 (SEQ ID NO:200), GHPO 1002 (SEQ ID NO:202), GHPO 1026 (SEQ ID NO:204), GHPO 1028 (SEQ ID NO:206), GHPO 1034 (SEQ ID NO:208), GHPO 1038 (SEQ ID NO:210), GHPO 1059 (SEQ ID NO:212), GHPO 1065 (SEQ ID NO:214), GHPO 1072 (SEQ ID NO:216), GHPO 1073 (SEQ ID NO:218), GHPO 1088 (SEQ ID NO:220), GHPO 1091 (SEQ ID NO:222), GHPO 1105 (SEQ ID NO:224), GHPO 1115 (SEQ ID NO:226), GHPO 1159 (SEQ ID NO:228), GHPO 1177 (SEQ ID NO:230), GHPO 1187 (SEQ ID NO:232), GHPO 1192 (SEQ ID NO:234), GHPO 1195 (SEQ ID NO:236), GHPO 1224 (SEQ ID NO:238), GHPO 1225 (SEQ ID NO:240), GHPO 1228 (SEQ ID NO:242), GHPO 1229 (SEQ ID NO:244), GHPO 1231 (SEQ ID NO:246), GHPO 1236 (SEQ ID NO:248), GHPO 1242 (SEQ ID NO:250), GHPO 1248 (SEQ ID NO:252), GHPO 1270 (SEQ ID NO:254), GHPO 1271 (SEQ ID NO:256), GHPO 1298 (SEQ ID NO:258), GHPO 1301 (SEQ ID NO:260), GHPO 1304 (SEQ ID NO:262), GHPO 1315 (SEQ ID NO:264), GHPO 1319 (SEQ ID NO:266), GHPO 1323 (SEQ ID NO:268), GHPO 1331 (SEQ ID NO:270), GHPO 1332 (SEQ ID NO:272), GHPO 1347 (SEQ ID NO:274), GHPO 1373 (SEQ ID NO:276), GHPO 1376 (SEQ ID NO:278), GHPO 1380 (SEQ ID NO:280), GHPO 1394 (SEQ ID NO:282), GHPO 1407 (SEQ ID NO:284), GHPO 1415 (SEQ ID NO:286), GHPO 1425 (SEQ ID NO:288), GIIPO 1427 (SEQ ID NO:290), GHPO 1444 (SEQ ID NO:292), GHPO 1449 (SEQ ID NO:294), GHPO 1465 (SEQ ID NO:296), GHPO 1475 (SEQ ID NO:298), GHPO 1479 (SEQ ID NO:300), GHPO 1483 (SEQ ID NO:302), GHPO 1488 (SEQ ID NO:304), GHPO 1496 (SEQ ID NO:306), GHPO 1524 (SEQ ID NO:308), GHPO 1536 (SEQ ID NO:310), GHPO 1539 (SEQ ID NO:312), GHPO 1540 (SEQ ID NO:314), GHPO 1542 (SEQ ID NO:316), GHPO 1555 (SEQ ID NO:318), GHPO 1560 (SEQ ID NO:320), GHPO 1564 (SEQ ID NO:322), GHPO 1570 (SEQ ID NO:324), GHPO 1588 (SEQ ID NO:326), GHPO 1604 (SEQ ID NO:328), GHPO 1605 (SEQ ID NO:330), GHPO 1619 (SEQ ID NO:332), GHPO 1629 (SEQ ID NO:334), GHPO 1642 (SEQ ID NO:336), GHPO 1654 (SEQ ID NO:338), GHPO 1661 (SEQ ID NO:340), GHPO 1673 (SEQ ID NO:342), GHPO 1687 (SEQ ID NO:344), GHPO 1692 (SEQ ID NO:346), GHPO 1693 (SEQ ID NO:348), GHPO 1699 (SEQ ID NO:350), GHPO 1738 (SEQ ID NO:352), GHPO 1745 (SEQ ID NO:354), GHPO 1746 (SEQ ID NO:356), GHPO 1754 (SEQ ID NO:358), GHPO 1792 (SEQ ID NO:360), GHPO 1795 (SEQ ID NO:362), and GHPO 1796 (SEQ ID NO:364); or
(ii) a derivative of said Helicobacter polypeptide.

9. The compound of claim 8, which is the mature form or a derivative of a polypeptide encoded by a DNA molecule of claim 4.

10. The compound of claim 8, which is the mature form or a derivative of a polypeptide encoded by a DNA molecule of claim 5.

11. A method of preventing or treating Helicobacter infection in a mammal, said method comprising administering to said mammal a prophylactically or therapeutically effective amount of a compound of claim 8.

12. The method of claim 11, further comprising administering to said mammal an antibiotic, an antisecretory agent, a bismuth salt, or a combination thereof.

13. The method of claim 12, wherein said antibiotic is selected from the group consisting of amoxicillin, clarithromycin, tetracycline, metronidizole, and erythromycin.

14. The method of claim 12, wherein said bismuth salt is selected from the group consisting of bismuth subcitrate and bismuth subsalicylate.

15. The method of claim 12, wherein said antisecretory agent is a proton pump inhibitor.

16. The method of claim 15, wherein said proton pump inhibitor is selected from the group consisting of omeprazole, lansoprazole, and pantoprazole.

17. The method of claim 12, wherein said antisecretory agent is an H₂-receptor antagonist.

18. The method of claim 17, wherein said H₂-receptor antagonist is selected from the group consisting of ranitidine, cimetidine, famotidine, nizatidine, and roxatidine.

19. The method of claim 12, wherein said antisecretory agent is a prostaglandin analog.

20. The method of claim 19, wherein said prostaglandin analog is misoprostil or enprostil.

21. The method of claim 11, further comprising administering to said mammal a prophylactically or therapeutically effective amount of a second Helicobacter polypeptide or a derivative thereof.

22. The method of claim 21, wherein the second Helicobacter polypeptide is a Helicobacter urease, or a subunit or a derivative thereof.

23. A composition comprising a compound of claim 8, together with a physiologically acceptable diluent or carrier.

24. The composition of claim 23, further comprising an adjuvant.

25. The composition of claim 23, further comprising a second Helicobacter polypeptide or a derivative thereof.

26. The composition of claim 25, wherein said second Helicobacter polypeptide is a Helicobacter urease, or a subunit or a derivative thereof.

27. A method of preventing or treating Helicobacter infection in a mammal, said method comprising administering to said mammal a prophylactically or therapeutically effective amount of a polynucleotide of claim 1.

28. A method of preventing or treating Helicobacter infection in a mammal, said method comprising administering to said mammal a prophylactically or therapeutically effective amount of a polynucleotide of claim 4.

29. A method of preventing or treating Helicobacter infection in a mammal, said method comprising administering to said mammal a prophylactically or therapeutically effective amount of a polynucleotide of claim 7.

30. A composition comprising a viral vector, in the genome of which is inserted a DNA molecule of claim 3, said DNA molecule being placed under conditions for expression in a mammalian cell and said viral vector being admixed with a physiologically acceptable diluent or carrier.

31. The composition of claim 30, wherein said viral vector is a poxvirus.

32. A composition that comprises a bacterial vector comprising a DNA molecule of claim 3, said DNA molecule being placed under conditions for expression and said bacterial vector being admixed with a physiologically acceptable diluent or carrier.

33. The composition of claim 32, wherein said vector is selected from the group consisting of Shigella, Salmonella, Vibrio cholerae, Lactobacillus, Bacille bilié de Calmette-Guérin, and Streptococcus.

34. A composition comprising a polynucleotide of claim 1, together with a physiologically acceptable diluent or carrier.

35. The composition of claim 34, wherein said polynucleotide is a DNA molecule that is inserted in a plasmid that is unable to replicate and to substantially integrate in a mammalian genome and is placed under conditions for expression in a mammalian cell.

36. An expression cassette comprising a DNA molecule of claim 3, said DNA molecule being placed under conditions for expression in a procaryotic or eucaryotic cell.

37. A process for producing a compound of claim 8, which comprises culturing a procaryotic or eucaryotic cell transformed or transfected with an expression cassette of claim 36, and recovering said compound from the cell culture.

38. A method of preventing or treating Helicobacter infection in a mammal, said method comprising administering to said mammal a prophylactically or therapeutically effective amount of an antibody that binds to the compound of claim 8.
